(19) United States
(12) Patent Application Publication
(10) Pub. No.: US 2024/0401039 A1
(43) Pub. Date: Dec. 5, 2024

(54) Compounds and Methods for Reducing ATXN2 Expression

(71) Applicant: Ionis Pharmaceuticals, Inc., Carlsbad, CA (US)

(72) Inventors: Susan M. Freier, San Diego, CA (US); Priyam Singh, San Diego, CA (US); Frank Rigo, Carlsbad, CA (US); Paymaan Jafar-nejad, Carlsbad, CA (US); Holly Kordasiewicz, San Diego, CA (US)

(73) Assignee: Ionis Pharmaceuticals, Inc., Carlsbad, CA (US)

(21) Appl. No.: 18/420,421

(22) Filed: Jan. 23, 2024

Related U.S. Application Data
(63) Continuation of application No. 17/238,814, filed on Apr. 23, 2021, now Pat. No. 11,926,825.
Application No. 17/238,814 is a division of application No. 16/522,133, filed on Jul. 25, 2019, now Pat. No. 11,078,486.
(60) Provisional application No. 62/703,240, filed on Jul. 25, 2018.

(51) Int. Cl. C12N 15/113; A61K 47/02; A61K 47/46

(52) U.S. Cl. CPC C12N 15/113; A61K 47/02; A61K 47/46; C12N 2310/14; C12N 2310/315; C12N 2310/322; C12N 2310/341; C12N 2310/346; C12N 2310/351

(57) ABSTRACT

Provided are compounds, methods, and pharmaceutical compositions for reducing the amount or activity of ATXN2 RNA in a cell or animal, and in certain instances reducing the amount of Ataxin-2 protein in a cell or animal. Such compounds, methods, and pharmaceutical compositions are useful to ameliorate at least one symptom or hallmark of a neurodegenerative disease. Such symptoms and hallmarks include ataxia, neuropathy, and aggregate formation. Such neurodegenerative diseases include spinocerebellar ataxia type 2 (SCA2), amyotrophic lateral sclerosis (ALS), and parkinsonism.

### SEQUENCE LISTING

[0001] The present application is being filed along with a Sequence Listing in electronic format. The Sequence Listing is provided as a file entitled BIOL0321SEQ.xml, created on Nov. 30, 2023, which is 3723 KB in size. The information in the electronic format of the sequence listing is incorporated herein by reference in its entirety.

### FIELD

[0002] Provided are compounds, methods, and pharmaceutical compositions for reducing the amount or activity of ATXN2 RNA in a cell or animal, and in certain instances reducing the amount of Ataxin-2 protein in a cell or animal. Such compounds, methods, and pharmaceutical compositions are useful to ameliorate at least one symptom or hallmark of a neurodegenerative disease. Such symptoms and hallmarks include ataxia, neuropathy, and aggregate formation. Such neurodegenerative diseases include spinocerebellar ataxia type 2 (SCA2), amyotrophic lateral sclerosis (ALS), and parkinsonism.

### BACKGROUND

[0003] Spinocerebellar ataxia type 2 (SCA2) is an autosomal dominant neurodegenerative disease characterized by progressive functional and cell loss of neurons in the cerebellum, brain stem and spinal cord. The cause of SCA2 is CAG expansion in the ATXN2 gene resulting in polyglutamine (polyQ) expansion in the ataxin-2 protein. Patients with SCA2 are characterized by progressive cerebellar ataxia, slow saccadic eye movements and other neurologic features such as neuropathy (Pulst, S. M. (ed.), Genetics of Movement Disorders. Elsevier, Inc., Amsterdam, 2003, pp. 19-34.). Moderate CAG expansion in the ATXN2 gene is also associated with parkinsonism or amyotrophic lateral sclerosis (ALS) indistinguishable from the idiopathic forms of these diseases (Kim et al., Arch. Neurol., 2007, 64: 1510-1518; Ross et al., Hum. Mol. Genet., 2011, 20: 3207-3212; Corrado et al., Hum. Genet., 2011, 130: 575-580; Elden et al., Nature, 2010, 466: 1069-1075; Van Damme et al., Neurology, 2011, 76: 2066-2072).

[0004] The pathogenic functions of polyQ disease proteins that occur with polyQ expansion may be attributed to the gain of toxicity associated with the development of intranuclear inclusion bodies or with soluble toxic oligomers (Lajoie et al., PLoS One, 2011, 5: e15245). While SCA2 patient brains are characterized by loss of Purkinje cells, SCA2 Purkinje cells lack inclusion bodies indicating polyQ-expanded ataxin-2 may cause toxicity that is unrelated to inclusion body formation (Huynh et al., Ann. Neurol., 1999, 45: 232-241). Functions gained in polyQ-expanded ataxin-2 may include anomalous accumulation in Golgi bodies (Huynh et al., Hum. Mol. Genet., 2003, 12: 1485-1496), gain-of-normal functions (Duvick et al., Neuron, 2010, 67: 929-935) and sequestering of transcription factors (TFs) and glyceraldehyde-3-phosphate dehydrogenase like for other polyQ proteins (Yamanaka et al., Methods Mol. Biol., 2010: 648, 215-229; Koshy et al., Hum. Mol. Genet., 1996, 5: 1311-1318; Burke et al., Nat. Med., 1996, 2: 347-350). Some normal functions of ataxin-2 have been characterized. Ataxin-2 is present in stress granules and P-bodies suggesting functions in sequestering mRNAs and protein translation regulation during stress (Nonhoff et al., Mol. Biol. Cell, 2007, 18: 1385-1396). Ataxin-2 overexpression interfered with the P-body assembly, while underexpression interfered with stress granule assembly (Nonhoff et al., Mol. Biol. Cell, 2007, 18: 1385-1396). Interactions with polyA-binding protein 1, the RNA splicing factor A2BP1/Fox1 and polyribosomes further support roles for ataxin-2 in RNA metabolism (Shibata et al., Hum. Mol. Genet., 2000, 9:1303-1313; Ciosk et al., Development, 2004, 131: 4831-4841; Satterfield et al., Hum. Mol. Genet., 2006, 15: 2523-2532). Ataxin-2 is a regulator of EGF receptor internalization and signaling by the way of its interactions with SRC kinase and the endocytic protein CIN85 (Nonis et al., Cell Signal., 2008, 20: 1725-1739). Ataxin-2 also interacts with the ALS-related protein TDP-43 in an RNA-dependent manner and familial and sporadic ALS associates with the occurrence of long normal CAG repeat expansion ATXN2 (Elden et al., Nature, 2010, 466: 1069-1075; Van Damme et al., Neurology, 2011, 76: 2066-2072).

[0005] Currently there is a lack of acceptable options for treating such neurodegenerative diseases. It is therefore an object herein to provide methods for the treatment of such diseases.

### SUMMARY OF THE INVENTION

[0006] Provided herein are compounds, methods, and pharmaceutical compositions for reducing the amount or activity of ATXN2 RNA, and in certain embodiments reducing the amount of Ataxin-2 protein in a cell or animal. In certain embodiments, the animal has a neurodegenerative disease. In certain embodiments, the animal has spinocerebellar ataxia type 2 (SCA2), amyotophic lateral sclerosis (ALS), or parkinsonism. In certain embodiments, compounds useful for reducing expression of ATXN2 RNA are oligomeric compounds. In certain embodiments, the oligomeric compound comprises a modified oligonucleotide.

[0007] Also provided are methods useful for ameliorating at least one symptom or hallmark of a neurodegenerative disease. In certain embodiments, the neurodegenerative disease is SCA2, ALS, or parkinsonism. In certain embodiments symptoms and hallmarks include ataxia, neuropathy, and aggregate formation. In certain embodiments, amelioration of these symptoms results in improved motor function, reduced neuropathy, and reduction in number of aggregates.

### DETAILED DESCRIPTION OF THE INVENTION

[0008] It is to be understood that both the foregoing general description and the following detailed description are exemplary and explanatory only and are not restrictive. Herein, the use of the singular includes the plural unless specifically stated otherwise. As used herein, the use of “or” means “and/or” unless stated otherwise. Furthermore, the use of the term “including” as well as other forms, such as “includes” and “included”, is not limiting. Also, terms such as “element” or “component” encompass both elements and components comprising one unit and elements and components that comprise more than one subunit, unless specifically stated otherwise.

[0009] The section headings used herein are for organizational purposes only and are not to be construed as limiting the subject matter described. All documents, or portions of documents, cited in this application, including, but not limited to, patents, patent applications, articles, books, and treatises, are hereby expressly incorporated-by-reference for the portions of the document discussed herein, as well as in their entirety.

### Definitions

[0010] Unless specific definitions are provided, the nomenclature used in connection with, and the procedures and techniques of, analytical chemistry, synthetic organic chemistry, and medicinal and pharmaceutical chemistry described herein are those well known and commonly used in the art. Where permitted, all patents, applications, published applications and other publications and other data referred to throughout in the disclosure are incorporated by reference herein in their entirety.

[0011] Unless otherwise indicated, the following terms have the following meanings:

[0012] As used herein, “2′-deoxynucleoside” means a nucleoside comprising a 2′-H(H) deoxyribosy sugar moiety, as found in naturally occurring deoxyribonucleic acids (DNA). In certain embodiments, a 2′-deoxynucleoside may comprise a modified nucleobase or may comprise an RNA nucleobase (uracil).

[0013] As used herein, “2′-substituted nucleoside” means a nucleoside comprising a 2′-substituted sugar moiety. As used herein, “2′-substituted” in reference to a sugar moiety means a sugar moiety comprising at least one 2′-substituent group other than H or OH.

[0014] As used herein, “5-methyl cytosine” means a cytosine modified with a methyl group attached to the 5 position. A 5-methyl cytosine is a modified nucleobase.

[0015] As used herein, “administering” means providing a pharmaceutical agent to an animal.

[0016] As used herein, “animal” means a human or non-human animal.

[0017] As used herein, “antisense activity” means any detectable and/or measurable change attributable to the hybridization of an antisense compound to its target nucleic acid. In certain embodiments, antisense activity is a decrease in the amount or expression of a target nucleic acid or protein encoded by such target nucleic acid compared to target nucleic acid levels or target protein levels in the absence of the antisense compound.

[0018] As used herein, “antisense compound” means an oligomeric compound capable of achieving at least one antisense activity.

[0019] As used herein, “ameliorate” in reference to a treatment means improvement in at least one symptom relative to the same symptom in the absence of the treatment. In certain embodiments, amelioration is the reduction in the severity or frequency of a symptom or the delayed onset or slowing of progression in the severity or frequency of a symptom. In certain embodiments, the symptom or hallmark is ataxia, neuropathy, and aggregate formation. In certain embodiments, amelioration of these symptoms results in improved motor function, reduced neuropathy, or reduction in number of aggregates.

[0020] As used herein, “bicyclic nucleoside” or “BNA” means a nucleoside comprising a bicyclic sugar moiety.

[0021] As used herein, “bicyclic sugar” or “bicyclic sugar moiety” means a modified sugar moiety comprising two rings, wherein the second ring is formed via a bridge connecting two of the atoms in the first ring thereby forming a bicyclic structure. In certain embodiments, the first ring of the bicyclic sugar moiety is a furanosyl moiety. In certain embodiments, the bicyclic sugar moiety does not comprise a furanosyl moiety.

[0022] As used herein, “cleavable moiety” means a bond or group of atoms that is cleaved under physiological conditions, for example, inside a cell, an animal, or a human.

[0023] As used herein, “complementary” in reference to an oligonucleotide means that at least 70% of the nucleobases of the oligonucleotide or one or more regions thereof and the nucleobases of another nucleic acid or one or more regions thereof are capable of hydrogen bonding with one another when the nucleobase sequence of the oligonucleotide and the other nucleic acid are aligned in opposing directions. Complementary nucleobases means nucleobases that are capable of forming hydrogen bonds with one another. Complementary nucleobase pairs include adenine (A) and thymine (T, adenine (A) and uracil (U), cytosine (C) and guanine (G), 5-methyl cytosine (mC) and guanine (G). Complementary oligonucleotides and/or nucleic acids need not have nucleobase complementarity at each nucleoside. Rather, some mismatches are tolerated. As used herein, “fully complementary” or “100% complementary” in reference to oligonucleotides means that oligonucleotides are complementary to another oligonucleotide or nucleic acid at each nucleoside of the oligonucleotide.

[0024] As used herein, “conjugate group” means a group of atoms that is directly attached to an oligonucleotide. Conjugate groups include a conjugate moiety and a conjugate linker that attaches the conjugate moiety to the oligonucleotide.

[0025] As used herein, “conjugate linker” means a single bond or a group of atoms comprising at least one bond that connects a conjugate moiety to an oligonucleotide.

[0026] As used herein, “conjugate moiety” means a group of atoms that is attached to an oligonucleotide via a conjugate linker.

[0027] As used herein, “contiguous” in the context of an oligonucleotide refers to nucleosides, nucleobases, sugar moieties, or internucleoside linkages that are immediately adjacent to each other. For example, “contiguous nucleobases” means nucleobases that are immediately adjacent to each other in a sequence.

[0028] As used herein, “constrained ethyl” or “cEt” or “cEt modified sugar” means a β-D ribosyl bicyclic sugar moiety wherein the second ring of the bicyclic sugar is formed via a bridge connecting the 4′-carbon and the 2′-carbon of the β-D ribosyl sugar moiety, wherein the bridge has the formula 4′-CH(CH₃)—O-2′, and wherein the methyl group of the bridge is in the S configuration.

[0029] As used herein, “cEt nucleoside” means a nucleoside comprising cEt modified sugar.

[0030] As used herein, “chirally enriched population” means a plurality of molecules of identical molecular formula, wherein the number or percentage of molecules within the population that contain a particular stereochemical configuration at a particular chiral center is greater than the number or percentage of molecules expected to contain the same particular stereochemical configuration at the same particular chiral center within the population if the particular chiral center were stereorandom. Chirally enriched populations of molecules having multiple chiral centers within each molecule may contain one or more stereorandom chiral centers. In certain embodiments, the molecules are modified oligonucleotides. In certain embodiments, the molecules are compounds comprising modified oligonucleotides.

[0031] As used herein, “gapmer” means a modified oligonucleotide comprising an internal region having a plurality of nucleosides that support RNase H cleavage positioned between external regions having one or more nucleosides, wherein the nucleosides comprising the internal region are chemically distinct from the nucleoside or nucleosides comprising the external regions. The internal region may be referred to as the “gap” and the external regions may be referred to as the “wings.” Unless otherwise indicated, “gapmer” refers to a sugar motif. Unless otherwise indicated, the sugar moieties of the nucleosides of the gap of a gapmer are unmodified 2′-deoxyribosyl. Thus, the term “MOE gapmer” indicates a gapmer having a sugar motif of 2′-MOE nucleosides in both wings and a gap of 2′-deoxynucleosides. Unless otherwise indicated, a MOE gapmer may comprise one or more modified internucleoside linkages and/or modified nucleobases and such modifications do not necessarily follow the gapmer pattern of the sugar modifications.

[0032] As used herein, “hotspot region” is a range of nucleobases on a target nucleic acid amenable to oligomeric compound-mediated reduction of the amount or activity of the target nucleic acid.

[0033] As used herein, “hybridization” means the pairing or annealing of complementary oligonucleotides and/or nucleic acids. While not limited to a particular mechanism, the most common mechanism of hybridization involves hydrogen bonding, which may be Watson-Crick, Hoogsteen or reversed Hoogsteen hydrogen bonding, between complementary nucleobases.

[0034] As used herein, the term “internucleoside linkage” is the covalent linkage between adjacent nucleosides in an oligonucleotide. As used herein “modified internucleoside linkage” means any internucleoside linkage other than a phosphodiester internucleoside linkage. “Phosphorothioate internucleoside linkage” is a modified internucleoside linkage in which one of the non-bridging oxygen atoms of a phosphodiester internucleoside linkage is replaced with a sulfur atom.

[0035] As used herein, “linker-nucleoside” means a nucleoside that links, either directly or indirectly, an oligonucleotide to a conjugate moiety. Linker-nucleosides are located within the conjugate linker of an oligomeric compound. Linker-nucleosides are not considered part of the oligonucleotide portion of an oligomeric compound even if they are contiguous with the oligonucleotide.

[0036] As used herein, “non-bicyclic modified sugar moiety” means a modified sugar moiety that comprises a modification, such as a substituent, that does not form a bridge between two atoms of the sugar to form a second ring.

[0037] As used herein, “mismatch” or “non-complementary” means a nucleobase of a first oligonucleotide that is not complementary with the corresponding nucleobase of a second oligonucleotide or target nucleic acid when the first and second oligonucleotide are aligned.

[0038] As used herein, “MOE” means methoxyethyl. “2′-MOE” or “2′-MOE modified sugar” means a 2′-OCH₂CH₂OCH₃ group in place of the 2′—OH group of a ribosyl sugar moiety. As used herein, “2′-MOE nucleoside” means a nucleoside comprising a 2′-MOE modified sugar.

[0039] As used herein, “motif” means the pattern of unmodified and/or modified sugar moieties, nucleobases, and/or internucleoside linkages, in an oligonucleotide.

[0040] As used herein, “neurodegenerative disease” means a condition marked by progressive loss of function or structure, including loss of motor function and death of neurons. In certain embodiments, the neurodegenerative disease is spinocerebellar ataxia type 2 (SCA2), amyotrophic lateral sclerosis (ALS), or parkinsonism.

[0041] As used herein, “nucleobase” means an unmodified nucleobase or a modified nucleobase. As used herein an “unmodified nucleobase” is adenine (A), thymine (T), cytosine (C), uracil (U), or guanine (G). As used herein, a “modified nucleobase” is a group of atoms other than unmodified A, T, C, U, or G capable of pairing with at least one unmodified nucleobase. A “5-methyl cytosine” is a modified nucleobase. A universal base is a modified nucleobase that can pair with any one of the five unmodified nucleobases. As used herein, “nucleobase sequence” means the order of contiguous nucleobases in a nucleic acid or oligonucleotide independent of any sugar or internucleoside linkage modification.

[0042] As used herein, “nucleoside” means a compound comprising a nucleobase and a sugar moiety. The nucleobase and sugar moiety are each, independently, unmodified or modified. As used herein, “modified nucleoside” means a nucleoside comprising a modified nucleobase and/or a modified sugar moiety. Modified nucleosides include abasic nucleosides, which lack a nucleobase. “Linked nucleosides” are nucleosides that are connected in a contiguous sequence (i.e., no additional nucleosides are presented between those that are linked).

[0043] As used herein, “oligomeric compound” means an oligonucleotide and optionally one or more additional features, such as a conjugate group or terminal group. An oligomeric compound may be paired with a second oligomeric compound that is complementary to the first oligomeric compound or may be unpaired. A “singled-stranded oligomeric compound” is an unpaired oligomeric compound. The term “oligomeric duplex” means a duplex formed by two oligomeric compounds having complementary nucleobase sequences. Each oligomeric compound of an oligomeric duplex may be referred to as a “duplexed oligomeric compound.”

[0044] As used herein, “oligonucleotide” means a strand of linked nucleosides connected via internucleoside linkages, wherein each nucleoside and internucleoside linkage may be modified or unmodified. Unless otherwise indicated, oligonucleotides consist of 8-50 linked nucleosides. As used herein, “modified oligonucleotide” means an oligonucleotide, wherein at least one nucleoside or internucleoside linkage is modified. As used herein, “unmodified oligonucleotide” means an oligonucleotide that does not comprise any nucleoside modifications or internucleoside modifications.

[0045] As used herein, “pharmaceutically acceptable carrier or diluent” means any substance suitable for use in administering to an animal. Certain such carriers enable pharmaceutical compositions to be formulated as, for example, tablets, pills, dragees, capsules, liquids, gels, syrups, slurries, suspension and lozenges for the oral ingestion by a subject. In certain embodiments, a pharmaceutically acceptable carrier or diluent is sterile water, sterile saline, sterile buffer solution or sterile artificial cerebrospinal fluid.

[0046] As used herein “pharmaceutically acceptable salts” means physiologically and pharmaceutically acceptable salts of compounds. Pharmaceutically acceptable salts retain the desired biological activity of the parent compound and do not impart undesired toxicological effects thereto.

[0047] As used herein “pharmaceutical composition” means a mixture of substances suitable for administering to a subject. For example, a pharmaceutical composition may comprise an oligomeric compound and a sterile aqueous solution. In certain embodiments, a pharmaceutical composition shows activity in free uptake assay in certain cell lines.

[0048] As used herein “prodrug” means a therapeutic agent in a form outside the body that is converted to a different form within an animal or cells thereof. Typically conversion of a prodrug within the animal is facilitated by the action of an enzymes (e.g., endogenous or viral enzyme) or chemicals present in cells or tissues and/or by physiologic conditions.

[0049] As used herein, “reducing or inhibiting the amount or activity” refers to a reduction or blockade of the transcriptional expression or activity relative to the transcriptional expression or activity in an untreated or control sample and does not necessarily indicate a total elimination of transcriptional expression or activity.

[0050] As used herein, “RNAi compound” means an antisense compound that acts, at least in part, through RISC or Ago2 to modulate a target nucleic acid and/or protein encoded by a target nucleic acid. RNAi compounds include, but are not limited to double-stranded siRNA, single-stranded RNA (ssRNA), and microRNA, including microRNA mimics. In certain embodiments, an RNAi compound modulates the amount, activity, and/or splicing of a target nucleic acid. The term RNAi compound excludes antisense compounds that act through RNase H.

[0051] As used herein, “self-complementary” in reference to an oligonucleotide means an oligonucleotide that at least partially hybridizes to itself.

[0052] As used herein, “standard cell assay” means the assay described in Example 3 and reasonable variations thereof.

[0053] As used herein, “standard in vivo assay” means the experiment described in Example 15 and reasonable variations thereof.

[0054] As used herein, “stereorandom chiral center” in the context of a population of molecules of identical molecular formula means a chiral center having a random stereochemical configuration. For example, in a population of molecules comprising a stereorandom chiral center, the number of molecules having the (S) configuration of the stereorandom chiral center may be but is not necessarily the same as the number of molecules having the (R) configuration of the stereorandom chiral center. The stereochemical configuration of a chiral center is considered random when it is the results of a synthetic method that is not designed to control the stereochemical configuration. In certain embodiments, a stereorandom chiral center is a stereorandom phosphorothioate internucleoside linkage.

[0055] As used herein, “sugar moiety” means an unmodified sugar moiety or a modified sugar moiety. As used herein, “unmodified sugar moiety” means a 2′-OH(H) ribosyl moiety, as found in RNA (an “unmodified RNA sugar moiety”), or a 2′-H(H) deoxyribosyl moiety, as found in DNA (an “unmodified DNA sugar moiety”). Unmodified sugar moieties have one hydrogen at each of the 1′, 3′, and 4′ positions, an oxygen at the 3′ position, and two hydrogens at the 5′ position. As used herein, “modified sugar moiety” or “modified sugar” means a modified furanosyl sugar moiety or a sugar surrogate.

[0056] As used herein, “sugar surrogate” means a modified sugar moiety having other than a furanosyl moiety that can link a nucleobase to another group, such as an internucleoside linkage, conjugate group, or terminal group in an oligonucleotide. Modified nucleosides comprising sugar surrogates can be incorporated into one or more positions within an oligonucleotide and such oligonucleotides are capable of hybridizing to complementary oligomeric compounds or target nucleic acids.

[0057] As used herein, “target nucleic acid” and “target RNA” mean a nucleic acid that an antisense compound is designed to affect.

[0058] As used herein, “target region” means a portion of a target nucleic acid to which an oligomeric compound is designed to hybridize.

[0059] As used herein, “terminal group” means a chemical group or group of atoms that is covalently linked to a terminus of an oligonucleotide.

[0060] As used herein, “therapeutically effective amount” means an amount of a pharmaceutical agent that provides a therapeutic benefit to an animal. For example, a therapeutically effective amount improves a symptom of a disease.

### CERTAIN EMBODIMENTS

[0061] The present disclosure provides the following non-limiting numbered embodiments:

[0062] Embodiment 1. An oligomeric compound, comprising a modified oligonucleotide consisting of 12-50 linked nucleosides wherein the nucleobase sequence of the modified oligonucleotide is at least 90% complementary to an equal length portion of an ATXN2 nucleic acid, and wherein the modified oligonucleotide comprises at least one modification selected from a modified sugar, a sugar surrogate, and a modified internucleoside linkage.

[0063] Embodiment 2. An oligomeric compound comprising a modified oligonucleotide consisting of 12-50 linked nucleosides and having a nucleobase sequence comprising at least 12, at least 13, at least 14, at least 15, at least 16, at least 17, at least 18, at least 19, or at least 20 contiguous nucleobases of any of the nucleobase sequences of SEQ ID NOS: 30-3319.

[0064] Embodiment 3. An oligomeric compound comprising a modified oligonucleotide consisting of 12-50 linked nucleosides and having a nucleobase sequence comprising a portion of at least 8, at least 9, at least 10, at least 11, at least 12, at least 13, at least 14, at least 15, at least 16, at least 17, at least 18, at least 19, or at least 20 contiguous nucleobases, wherein the portion is complementary to:

[0065] an equal length portion of nucleobases 2,455-2,483 of SEQ ID NO: 1;

[0066] an equal length portion of nucleobases 4,393-4,424 of SEQ ID NO: 1;

[0067] an equal length portion of nucleobases 4,413-4,437 of SEQ ID NO: 1;

[0068] an equal length portion of nucleobases 4,525-4,554 of SEQ ID NO: 2;

[0069] an equal length portion of nucleobases 4,748-4,771 of SEQ ID NO: 2;

[0070] an equal length portion of nucleobases 9,927-9,954 of SEQ ID NO: 2;

[0071] an equal length portion of nucleobases 10,345-10,368 of SEQ ID NO: 2;

[0072] an equal length portion of nucleobases 17,153-17,182 of SEQ ID NO: 2;

[0073] an equal length portion of nucleobases 18,680-18,702 of SEQ ID NO: 2;

[0074] an equal length portion of nucleobases 23,251-23,276 of SEQ ID NO: 2;

[0075] an equal length portion of nucleobases 28,081-28,105 of SEQ ID NO: 2;

[0076] an equal length portion of nucleobases 28,491-28,526 of SEQ ID NO: 2;

[0077] an equal length portion of nucleobases 28,885-28,912 of SEQ ID NO: 2;

[0078] an equal length portion of nucleobases 32,328-32,352 of SEQ ID NO: 2;

[0079] an equal length portion of nucleobases 32,796-32,824 of SEQ ID NO: 2;

[0080] an equal length portion of nucleobases 32,809-32,838 of SEQ ID NO: 2;

[0081] an equal length portion of nucleobases 36,308-36,334 of SEQ ID NO: 2;

[0082] an equal length portion of nucleobases 36,845-36,872 of SEQ ID NO: 2;

[0083] an equal length portion of nucleobases 49,147-49,173 of SEQ ID NO: 2;

[0084] an equal length portion of nucleobases 57,469-57,494 of SEQ ID NO: 2;

[0085] an equal length portion of nucleobases 82,848-82,874 of SEQ ID NO: 2;

[0086] an equal length portion of nucleobases 83,784-83,813 of SEQ ID NO: 2;

[0087] an equal length portion of nucleobases 84,743-84,782 of SEQ ID NO: 2;

[0088] an equal length portion of nucleobases 84,813-84,839 of SEQ ID NO: 2;

[0089] an equal length portion of nucleobases 85,051-85,076 of SEQ ID NO: 2;

[0090] an equal length portion of nucleobases 97,618-97,643 of SEQ ID NO: 2;

[0091] an equal length portion of nucleobases 119,023-119,048 of SEQ ID NO: 2;

[0092] an equal length portion of nucleobases 132,161-132,195 of SEQ ID NO: 2;

[0093] an equal length portion of nucleobases 139,271-139,303 of SEQ ID NO: 2; or

[0094] an equal length portion of nucleobases 1,075-1,146 of SEQ ID NO: 1.

[0095] Embodiment 4. The oligomeric compound of any one of embodiments 1-3, wherein the modified oligonucleotide has a nucleobase sequence that is at least 80%, at least 85%, at least 90%, at least 95%, or 100% complementary to any of the nucleobase sequences of SEQ ID NO: 1 or SEQ ID NO: 2, when measured across the entire nucleobase sequence of the modified oligonucleotide.

[0096] Embodiment 5. The oligomeric compound of any of embodiments 1-4, wherein the modified oligonucleotide comprises at least one modified nucleoside.

[0097] Embodiment 6. The oligomeric compound of embodiment 5, wherein the modified oligonucleotide comprises at least one modified nucleoside comprising a modified sugar moiety.

[0098] Embodiment 7. The oligomeric compound of embodiment 6, wherein the modified oligonucleotide comprises at least one modified nucleoside comprising a bicyclic sugar moiety.

[0099] Embodiment 8. The oligomeric compound of embodiment 7, wherein the modified oligonucleotide comprises at least one modified nucleoside comprising a bicyclic sugar moiety having a 2′-4′ bridge, wherein the 2′-4′ bridge is selected from —O-CH2-; and —O—CH(CH3)-.

[0100] Embodiment 9. The oligomeric compound of any of embodiments 5-8, wherein the modified oligonucleotide comprises at least one modified nucleoside comprising a non-bicyclic modified sugar moiety.

[0101] Embodiment 10. The oligomeric compound of embodiment 9, wherein the modified oligonucleotide comprises at least one modified nucleoside comprising a non-bicyclic modified sugar moiety comprising a 2′-MOE modified sugar or 2′-OMe modified sugar.

[0102] Embodiment 11. The oligomeric compound of any of embodiments 5-10, wherein the modified oligonucleotide comprises at least one modified nucleoside comprising a sugar surrogate.

[0103] Embodiment 12. The oligomeric compound of embodiment 11, wherein the modified oligonucleotide comprises at least one modified nucleoside comprising a sugar surrogate selected from morpholino and PNA.

[0104] Embodiment 13. The oligomeric compound of any of embodiments 1-12, wherein the modified oligonucleotide has a sugar motif comprising:

[0105] a 5′-region consisting of 1-5 linked 5′-region nucleosides;

[0106] a central region consisting of 6-10 linked central region nucleosides; and

[0107] a 3′-region consisting of 1-5 linked 3′-region nucleosides; wherein

[0108] each of the 5′-region nucleosides and each of the 3′-region nucleosides comprises a modified sugar moiety and each of the central region nucleosides comprises an unmodified 2′-deoxyribosyl sugar moiety.

[0109] Embodiment 14. The oligomeric compound of any of embodiments 1-13, wherein the modified oligonucleotide comprises at least one modified internucleoside linkage.

[0110] Embodiment 15. The oligomeric compound of embodiment 14, wherein each internucleoside linkage of the modified oligonucleotide is a modified internucleoside linkage.

[0111] Embodiment 16. The oligomeric compound of embodiment 14 or 15 wherein at least one internucleoside linkage is a phosphorothioate internucleoside linkage.

[0112] Embodiment 17. The oligomeric compound of embodiment 14 or 16 wherein the modified oligonucleotide comprises at least one phosphodiester internucleoside linkage.

[0113] Embodiment 18. The oligomeric compound of any of embodiments 14, 16, or 17, wherein each internucleoside linkage is either a phosphodiester internucleoside linkage or a phosphorothioate internucleoside linkage.

[0114] Embodiment 19. The oligomeric compound of any of embodiments 1-18, wherein the modified oligonucleotide comprises at least one modified nucleobase.

[0115] Embodiment 20. The oligomeric compound of embodiment 19, wherein the modified nucleobase is a 5-methyl cytosine.

[0116] Embodiment 21. The oligomeric compound of any of embodiments 1-20, wherein the modified oligonucleotide consists of 12-30, 12-22, 12-20, 14-20, 15-25, 16-20, 18-22 or 18-20 linked nucleosides.

[0117] Embodiment 22. The oligomeric compound of any of embodiments 1-21, wherein the modified oligonucleotide consists of 18 or 20 linked nucleosides.

[0118] Embodiment 23. The oligomeric compound of any of embodiments 1-22 consisting of the modified oligonucleotide.

[0119] Embodiment 24. The oligomeric compound of any of embodiments 1-22 comprising a conjugate group comprising a conjugate moiety and a conjugate linker.

[0120] Embodiment 25. The oligomeric compound of embodiment 24, wherein the conjugate group comprises a GalNAc cluster comprising 1-3 GalNAc ligands.

[0121] Embodiment 26. The oligomeric compound of embodiment 24 or 25, wherein the conjugate linker consists of a single bond.

[0122] Embodiment 27. The oligomeric compound of embodiment 25, wherein the conjugate linker is cleavable.

[0123] Embodiment 28. The oligomeric compound of embodiment 27, wherein the conjugate linker comprises 1-3 linker-nucleosides.

[0124] Embodiment 29. The oligomeric compound of any of embodiments 24-28, wherein the conjugate group is attached to the modified oligonucleotide at the 5′-end of the modified oligonucleotide.

[0125] Embodiment 30. The oligomeric compound of any of embodiments 24-28, wherein the conjugate group is attached to the modified oligonucleotide at the 3′-end of the modified oligonucleotide.

[0126] Embodiment 31. The oligomeric compound of any of embodiments 1-30 comprising a terminal group.

[0127] Embodiment 32. The oligomeric compound of any of embodiments 1-31 wherein the oligomeric compound is a singled-stranded oligomeric compound.

[0128] Embodiment 33. The oligomeric compound of any of embodiments 1-27 or 29-31, wherein the oligomeric compound does not comprise linker-nucleosides.

[0129] Embodiment 34. An oligomeric duplex comprising an oligomeric compound of any of embodiments 1-31 or 33.

[0130] Embodiment 35. An antisense compound comprising or consisting of an oligomeric compound of any of embodiments 1-33 or an oligomeric duplex of embodiment 34.

[0131] Embodiment 36. A pharmaceutical composition comprising an oligomeric compound of any of embodiments 1-33 or an oligomeric duplex of embodiment 34 and a pharmaceutically acceptable carrier or diluent.

[0132] Embodiment 37. A modified oligonucleotide according to the following formula:

[chemical structure]

[0133] or a salt thereof.

[0134] Embodiment 38. A modified oligonucleotide according to the following formula:

[chemical structure]

[0135] or a salt thereof.

[0136] Embodiment 39. A modified oligonucleotide according to the following formula:

[chemical structure]

[0137] or a salt thereof.

[0138] Embodiment 40. A modified oligonucleotide according to the following formula:

[chemical structure]

[0139] or a salt thereof.

[0140] Embodiment 41. A modified oligonucleotide according to the following formula:

[chemical structure]

[0141] or a salt thereof.

[0142] Embodiment 42. A modified oligonucleotide according to the following formula:

[chemical structure]

[0143] or a salt thereof.

[0144] Embodiment 43. The modified oligonucleotide of any of embodiments 37-42, which is a sodium salt of the formula.

[0145] Embodiment 44. A modified oligonucleotide according to the following formula:

[chemical structure]

[0146] Embodiment 45. A modified oligonucleotide according to the following formula:

[chemical structure]

[0147] Embodiment 46. A modified oligonucleotide according to the following formula:

[chemical structure]

[0148] Embodiment 47. A modified oligonucleotide according to the following formula:

[chemical structure]

[0149] Embodiment 48. A modified oligonucleotide according to the following formula:

[chemical structure]

[0150] Embodiment 49. A modified oligonucleotide according to the following formula:

[chemical structure]

[0151] Embodiment 50. A chirally enriched population of the modified oligonucleotide of any of embodiments 3749 wherein the population is enriched for modified oligonucleotides comprising at least one particular phosphorothioate internucleoside linkage having a particular stereochemical configuration.

[0152] Embodiment 51. The chirally enriched population of embodiment 50, wherein the population is enriched for modified oligonucleotides comprising at least one particular phosphorothioate internucleoside linkage having the (Sp) configuration.

[0153] Embodiment 52. The chirally enriched population of embodiment 50 or 51, wherein the population is enriched for modified oligonucleotides comprising at least one particular phosphorothioate internucleoside linkage having the (Rp) configuration.

[0154] Embodiment 53. The chirally enriched population of embodiment 50, wherein the population is enriched for modified oligonucleotides having a particular, independently selected stereochemical configuration at each phosphorothioate internwcleoside linkage

[0155] Embodiment 54. The chirally enriched population of embodiment 53, wherein the population is enriched for modified oligonucleotides having the (Sp) configuration at each phosphorothioate internucleoside linkage.

[0156] Embodiment 55. The chirally enriched population of embodiment 53, wherein the population is enriched for modified oligonucleotides having the (Rp) configuration at each phosphorothioate internucleoside linkage.

[0157] Embodiment 56. The chirally enriched population of embodiment 50 or embodiment 53 wherein the population is enriched for modified oligonucleotides having at least 3 contiguous phosphorothioate internucleoside linkages in the Sp-Sp-Rp configuration, in the 5′ to 3′ direction.

[0158] Embodiment 57. A population of modified oligonucleotides of any of embodiments 37-49, wherein all of the phosphorothioate internucleoside linkages of the modified oligonucleotide are stereorandom.

[0159] Embodiment 58. A pharmaceutical composition comprising the modified oligonucleotide of any of embodiments 37-49 and a pharmaceutically acceptable diluent or carrier.

[0160] Embodiment 59. The pharmaceutical composition of embodiment 58, wherein the pharmaceutically acceptable diluent is artificial cerebrospinal fluid.

[0161] Embodiment 60. The pharmaceutical composition of embodiment 59, wherein the pharmaceutical composition consists essentially of the modified oligonucleotide and artificial cerebrospinal fluid.

[0162] Embodiment 61. A method comprising administering to an animal a pharmaceutical composition of any of embodiments 36 or 58-60.

[0163] Embodiment 62. A method of treating a disease associated with ATXN2 comprising administering to an individual having or at risk for developing a disease associated with ATXN2 a therapeutically effective amount of a pharmaceutical composition according to any of embodiments 36 or 58-60; and thereby treating the disease associated with ATXN2.

[0164] Embodiment 63. The method of embodiment 62, wherein the disease associated with ATXN2 is a neurodegenerative disease.

[0165] Embodiment 64. The method of embodiment 63, wherein the neurodegenerative disease is any of spinocerebellar ataxia type 2 (SCA2), amyotrophic lateral sclerosis (ALS), and parkinsonism.

[0166] Embodiment 65. The method of embodiment 64, wherein at least one symptom or hallmark of the neurodegenerative disease is ameliorated.

[0167] Embodiment 66. The method of embodiment 65, wherein the symptom or hallmark is any of ataxia, neuropathy, and aggregate formation.

[0168] Embodiment 67. An oligomeric compound comprising a modified oligonucleotide according to the following formula:

[0169] Ges Teo Aeo mCeo Teo Tds Tds Tds mCds Tds mCds Ads Tds Gds Tds Geo mCeo Ges Ges mCe (SEQ ID NO: 3320); wherein,

[0170] A=an adenine nucleobase,

[0171] mC=a 5-methyl cytosine nucleobase,

[0172] G=a guanine nucleobase,

[0173] T=a thymine nucleobase,

[0174] e=a 2′-MOE modified sugar,

[0175] d=a 2′-deoxyribose sugar,

[0176] s=a phosphorothioate internucleoside linkage, and

[0177] o=a phosphodiester internucleoside linkage.

[0178] Embodiment 68. An oligomeric compound comprising a modified oligonucleotide according to the following formula: mCes Teo Geo mCeo Tds Ads Ads mCds Tds Gds Gds Tds s Tds Geo mCeo mCeo mCes Tes Te (SEQ ID NO: 3321); wherein,

[0179] A=an adenine nucleobase,

[0180] mC=a 5-methyl cytosine nucleobase,

[0181] G=a guanine nucleobase,

[0182] T=a thymine nucleobase,

[0183] e=a 2′-MOE modified sugar,

[0184] d=a 2′-deoxyribose sugar,

[0185] s=a phosphorothioate internucleoside linkage, and

[0186] o=a phosphodiester internucleoside linkage.

[0187] Embodiment 69. An oligomeric compound comprising a modified oligonucleotide according to the following formula: Tes Geo Teo Aeo mCeo Teo Tds mCds Ads mCds Ads Tds Tds Tds Gds Gds Aeo Ges mCes mCe (SEQ ID NO: 3322); wherein,

[0188] A=an adenine nucleobase,

[0189] mC=a 5-methyl cytosine nucleobase,

[0190] G=a guanine nucleobase,

[0191] T=a thymine nucleobase,

[0192] e=a 2′-MOE modified sugar,

[0193] d=a 2′-deoxyribose sugar,

[0194] s=a phosphorothioate internucleoside linkage, and

o=a phosphodiester internucleoside linkage.

[0195] Embodiment 70. An oligomeric compound comprising a modified oligonucleotide according to the following formula: Tes Geo Geo Aeo Teo Teo mCds Tds Gds Tds Ads mCds Tds Tds Tds Tds mCeo Tes mCes Ae (SEQ ID NO: 3323); wherein,

[0196] A=an adenine nucleobase,

[0197] mC=a 5-methyl cytosine nucleobase,

[0198] G=a guanine nucleobase,

[0199] T=a thymine nucleobase,

[0200] e=a 2′-MOE modified sugar,

[0201] d=a 2′-deoxyribose sugar,

[0202] s=a phosphorothioate internucleoside linkage, and

[0203] o=a phosphodiester internucleoside linkage.

[0204] Embodiment 71. An oligomeric compound comprising a modified oligonucleotide according to the following formula: mCes mCeo Teo Aeo Teo mCeo Ads Tds mCds Ads Tds Tds Tds Tds mCds mCds Aeo Ges Ges Ge (SEQ ID NO: 3324); wherein,

[0205] A=an adenine nucleobase,

[0206] mC=a 5-methyl cytosine nucleobase,

[0207] G=a guanine nucleobase,

[0208] T=a thymine nucleobase,

[0209] e=a 2′-MOE modified sugar,

[0210] d=a 2′-deoxyribose sugar,

[0211] s=a phosphorothioate internucleoside linkage, and

[0212] o=a phosphodiester internucleoside linkage.

[0213] Embodiment 72. An oligomeric compound comprising a modified oligonucleotide according to the following formula: Tes mCeo Teo Geo Tes Ads mCds Tds Tds Tds Tds mCds Tds mCds Ads Teo Geo Tes Ges mCe (SEQ ID NO: 3325); wherein,

[0214] A=an adenine nucleobase,

[0215] mC=a 5-methyl cytosine nucleobase,

[0216] G=a guanine nucleobase,

[0217] T=a thymine nucleobase,

[0218] e=a 2′-MOE modified sugar,

[0219] d=a 2′-deoxyribose sugar,

[0220] s=a phosphorothioate internucleoside linkage, and

[0221] o=a phosphodiester internucleoside linkage.

[0222] Embodiment 73. The oligomeric compound of embodiment 3, wherein the modified oligonucleotide is an RNAi compound.

[0223] Embodiment 74. The oligomeric compound of embodiment 73, wherein the RNAi compound is an ssRNA or an siRNA.

### I. Certain Oligonucleotides

[0224] In certain embodiments, provided herein are oligomeric compounds comprising oligonucleotides, which consist of linked nucleosides. Oligonucleotides may be unmodified oligonucleotides (RNA or DNA) or may be modified oligonucleotides. Modified oligonucleotides comprise at least one modification relative to unmodified RNA or DNA. That is, modified oligonucleotides comprise at least one modified nucleoside (comprising a modified sugar moiety and/or a modified nucleobase) and/or at least one modified internucleoside linkage.

### A. Certain Modified Nucleosides

[0225] Modified nucleosides comprise a modified sugar moiety or a modified nucleobase or both a modified sugar moiety and a modified nucleobase.

### 1. Certain Sugar Moieties

[0226] In certain embodiments, modified sugar moieties are non-bicyclic modified sugar moieties. In certain embodiments, modified sugar moieties are bicyclic or tricyclic sugar moieties. In certain embodiments, modified sugar moieties are sugar surrogates. Such sugar surrogates may comprise one or more substitutions corresponding to those of other types of modified sugar moieties.

[0227] In certain embodiments, modified sugar moieties are non-bicyclic modified sugar moieties comprising a furanosyl ring with one or more substituent groups none of which bridges two atoms of the fuanosyl ring to form a bicyclic structure. Such non bridging substituents may be at any position of the furanosyl, including but not limited to substituents at the 2′, 4′, and/or 5′ positions. In certain embodiments one or more non-bridging substituent of non-bicyclic modified sugar moieties is branched. Examples of 2′-substituent groups suitable for non-bicyclic modified sugar moieties include but are not limited to: 2′-F, 2′-OCH₃ (“OMe” or “O-methyl”), and 2′-O(CH₂)₂OCH₃ (“MOE”). In certain embodiments, 2′-substituent groups are selected from among: halo, allyl, amino, azido, SH, CN, OCN, CF₃, OCF₃, O—C₁-C₁₀ alkoxy, O—C₁-C₁₀ substituted alkoxy, O—C₁-C₁₀ alkyl, O—C₁-C₁₀ substituted alkyl, S-alkyl, N(Rₘ)- alkyl, O-alkenyl, S-alkenyl, N(Rₘ)-alkenyl, O-alkynyl, S-alkynyl, N(Rₘ)-alkynyl, O-alkylenyl-O-alkyl, alkynyl, alkaryl, aralkyl, O-alkaryl, O-aralkyl, O(CH₂)₂SCH₃, O(CH₂)₂ON(Rₘ)(Rₙ) or OCH₂C(═O)—N(Rₘ)(Rₙ), where each Rₘ and Rₙ is, independently, H, an amino protecting group, or substituted or unsubstituted C₁-C₁₀ alkyl, and the 2′-substituent groups described in Cook et al., U.S. Pat. No. 6,531,584; Cook et al., U.S. Pat. No. 5,859,221; and Cook et al., U.S. Pat. No. 6,005,087. Certain embodiments of these 2′-substituent groups can be further substituted with one or more substituent groups independently selected from among: hydroxyl, amino, alkoxy, carboxy, benzyl, phenyl, nitro (NO₂), thiol, thioalkoxy, thioalkyl, halogen, alkyl, aryl, alkenyl and alkynyl. Examples of 4′-substituent groups suitable for non-bicyclic modified sugar moieties include but are not limited to alkoxy (e.g., methoxy), alkyl, and those described in Manoharan et al., WO 2015/106128. Examples of 5′-substituent groups suitable for non-bicyclic modified sugar moieties include but are not limited to: 5-methyl (R or S), 5′-vinyl, and 5′-methoxy. In certain embodiments, non-bicyclic modified sugar moieties comprise more than one non-bridging sugar substituent, for example, 2′-F-5-methyl sugar moieties and the modified sugar moieties and modified nucleosides described in Migawa et al., WO 2008/101157 and Rajeev et al., US2013/0203836.

[0228] In certain embodiments, a 2′-substituted non-bicyclic modified nucleoside comprises a sugar moiety comprising a non-bridging 2′-substituent group selected from: F, NH₂, N₃, OCF₃, OCH₃, O(CH₂)₃NH₂, CH₂CH═CH₂, OCH₂CH═CH₂, OCH₂CH₂OCH₃, O(CH₂)₂SCH₃, O(CH₂)₂ON(Rₘ)(Rₙ), O(CH₂)₂O(CH₂)₂N(CH₃)₂, and N-substituted acetamide (OCH₂C(═O)—N(Rₘ)(Rₙ)), where each Rₘ and Rₙ is, independently, H, an amino protecting group, or substituted or unsubstituted C₁-C₁₀ alkyl.

[0229] In certain embodiments, a 2′-substituted nucleoside non-bicyclic modified nucleoside comprises a sugar moiety comprising a non-bridging 2′-substituent group selected from: F, OCF₃, OCH₃, OCH₂CH₂OCH₃, O(CH₂)₂SCH₃, O(CH₂)₂ON(CH₃)₂, O(CH₂)₂O(CH₂)₂N(CH₃)₂, and OCH₂C(═O)—N(H)CH₃ (“NMA”).

[0230] In certain embodiments, a 2′-substituted non-bicyclic modified nucleoside comprises a sugar moiety comprising a non-bridging 2′-substituent group selected from: F, OCH₃, and OCH₂CH₂OCH₃.

[0231] Certain modified sugar moieties comprise a substituent that bridges two atoms of the furanosyl ring to form a second ring, resulting in a bicyclic sugar moiety. In certain such embodiments, the bicyclic sugar moiety comprises a bridge between the 4′ and the 2′ furanose ring atoms. Examples of such 4′ to 2′ bridging sugar substituents include but are not limited to: 4′-CH₂-2′, 4′—(CH₂)₂-2′, 4′—(CH₂)₃-2′, 4′—CH₂—O-2′ (“LNA”), 4′-CH₂—S-2′, 4′—(CH₂)₂—O-2′ (“ENA”), 4′-CH(CH₃)—O-2′ (referred to as “constrained ethyl” or “cEt”), 4′-CH₂—O—CH₂-2′, 4′—CH₂—N(R)-2′, 4′—CH(CH₂OCH₃)—O-2′ (“constrained MOE” or “cMOE”) and analogs thereof (see, e.g., Seth et al., U.S. Pat. No. 7,399,845, Bhat et al., U.S. Pat. No. 7,569,686, Swayze et al., U.S. Pat. No. 7,741,457, and Swayze et al., U.S. Pat. No. 8,022,193), 4′-C(CH₃)(CH₃)—O-2′ and analogs thereof (see, e.g., Seth et al., U.S. Pat. No. 8,278,283), 4′-CH₂N(OCH₃)-2′ and analogs thereof (see, e.g., Prakash et al., U.S. Pat. No. 8,278,425), 4′-CH₂—N(CH₃)-2′ (see, e.g., Allerson et al., U.S. Pat. No. 7,696,345 and Allerson et al., U.S. Pat. No. 8,124,745), 4′-CH₂—C(H)(CH₃)-2′ (see, e.g., Zhou, et al., J. Org. Chem., 2009, 74, 118-134), 4′-CH₂—C(═CH₂)-2′ and analogs thereof (see e.g., Seth et al., U.S. Pat. No. 8,278,426), 4′-C(RₐR_{b})—N(R)—O-2′, 4′—C(RₐR_{b})—O—N(R)-2′, 4′—CH₂—O—N(R)-2′, and 4′-CH₂—N(R)—O-2′, wherein each R, Rₐ, and R_{b} is, independently, H, a protecting group, or C₁-C₁₂ alkyl (see, e.g. Imanishi et al., U.S. Pat. No. 7,427,672).

[0232] In certain embodiments, such 4′ to 2′ bridges independently comprise from 1 to 4 linked groups independently selected from: —[C(Rₐ)(R_{b})]ₙ—, —[C(Rₐ)R_{b})]ₙ—O—, —C(Rₐ)═C(R_{b})—, —C(Rₐ)=N—, —C(═NRₐ)—, —C(═O)—, —C(═S)—, —O—, —Si(Rₐ)₂—, —S(═O)ₓ—, and —N(Rₐ)—;

[0233] wherein:

[0234] x is 0, 1, or 2;

[0235] n is 1, 2, 3, or 4;

[0236] each Rₐ and R_{b} is, independertly, H, a protecting group, hydroxyl, C₁-C₁₂ alkyl, substituted C₁-C₁₂ alkyl, C₂-C₁₂ alkenyl, substituted C₂-C₁₂ alkenyl, C₂-C₁₂ alkynyl, substituted C₂-C₁₂ alkynyl, C₅-C₂₀ aryl, substituted C₅-C₂₀ aryl, heterocycle radical, substituted heterocycle radical, heteroaryl, substituted heteroaryl, C₅-C₇ alicyclic radical, substituted C₅-C₇ alicyclic radical, halogen, OJ₁, NJ₁J₂, SJ₁, N₃, COOJ₁, acyl (C(═O)—H), substituted acyl, CN, sulfonyl (S(═O)₂-J₁), or sulfoxyl (S(═O)-J₁); and

[0237] each J₁ and J₂ is, independently, H, C₁-C₁₂ alkyl, substituted C₁-C₁₂ alkyl, C₂-C₂ alkenyl, substituted C₂-C₁₂ alkenyl, C₂-C₁₂ alkynyl, substituted C₂-C₁₂ alkynyl, C₅-C₂₀ aryl, substituted C₅-C₂₀ aryl, acyl (C(═O)—H), substituted acyl, a heterocycle radical, a substituted heterocycle radical, C₁-C₁₂ aminoalkyl, substituted C₁-C₁₂ aminoalkyl, or a protecting group.

[0238] Additional bicyclic sugar moieties are known in the art, see, for example: Freier et al., Nucleic Acids Research, 1997, 25(22), 4429-4443, Albaek et al., J. Org. Chem., 2006, 71, 7731-7740, Singh et al., Chem. Commun., 1998, 4, 455-456; Koshkin et al., Tetrahedron, 1998, 54, 3607-3630; Kumar et al., Bioorg. Med. Chem. Lett., 1998, 8, 2219-2222; Singh et al., J. Org. Chem., 1998, 63, 10035-10039; Srivastava et al., J. Am. Chem. Soc., 2007, 129, 8362-8379; Wengel et al., U.S. Pat. No. 7,053,207; Imanishi et al., U.S. Pat. No. 6,268,490; Imanishi et al. U.S. Pat. No. 6,770,748; Imanishi et al., U.S. RE44,779; Wengel et al., U.S. Pat. No. 6,794,499; Wengel et al., U.S. Pat. No. 6,670,461; Wengel et al., U.S. Pat. No. 7,034,133; Wengel et al., U.S. Pat. No. 8,080,644; Wengel et al., U.S. Pat. No. 8,034,909; Wengel et al., U.S. Pat. No. 8,153,365; Wengel et al., U.S. Pat. No. 7,572,582; and Ramasamy et al., U.S. Pat. No. 6,525,191; Torsten et al., WO 2004/106356; Wengel et al., WO 1999/014226; Seth et al., WO 2007/134181; Seth et al., U.S. Pat. No. 7,547,684; Seth et al., U.S. Pat. No. 7,666,854; Seth et al., U.S. Pat. No. 8,088,746; Seth et al., U.S. Pat. No. 7,750,131; Seth et al., U.S. Pat. No. 8,030,467; Seth et al., U.S. Pat. No. 8,268,980; Seth et al., U.S. Pat. No. 8,546,556; Seth et al., U.S. Pat. No. 8,530,640; Migawa et al., U.S. Pat. No. 9,012,421; Seth et al., U.S. Pat. No. 8,501,805; and U.S. Patent Publication Nos. Allerson et al., US2008/0039618 and Migawa et al., US2015/0191727.

[0239] In certain embodiments, bicyclic sugar moieties and nucleosides incorporating such bicyclic sugar moieties are further defined by isomeric configuration. For example, an LNA nucleoside (described herein) may be in the α-L configuration or in the β-D configuration.

[chemical structure]

α-L-methyleneoxy (4′-CHr-O-2′) or α-L-LNA bicyclic nucleosides have been incorporated into oligonucleotides that showed antisense activity (Frieden et al., Nucleic Acids Research, 2003, 21, 6365-6372). Herein, general descriptions of bicyclic nucleosides include both isomeric configurations. When the positions of specific bicyclic nucleosides (e.g., LNA or cEt) are identified in exemplified embodiments herein, they are in the β-D configuration, unless otherwise specified.

[0240] In certain embodiments, modified sugar moieties comprise one or more non-bridging sugar substituent and one or more bridging sugar substituent (e.g., 5′-substituted and 4′-2′ bridged sugars).

[0241] In certain embodiments, modified sugar moieties are sugar surrogates. In certain such embodiments, the oxygen atom of the sugar moiety is replaced, e.g., with a sulfur, carbon or nitrogen atom. In certain such embodiments, such modified sugar moieties also comprise bridging and/or non-bridging substituents as described herein. For example, certain sugar surrogates comprise a 4′-sulfur atom and a substitution at the T-position (see, e.g., Bhat et al., U.S. Pat. No. 7,875,733 and Bhat et al., U.S. Pat. No. 7,939,677) and/or the 5′ position.

[0242] In certain embodiments, sugar surrogates comprise rings having other than 5 atoms. For example, in certain embodiments, a sugar surrogate comprises a six-membered tetrahydropyran (“THP”). Such tetrahydropyrans may be further modified or substituted. Nucleosides comprising such modified tetrahydropyrans include but are not limited to hexitol nucleic acid (“HNA”), anitol nucleic acid (“ANA”), manitol nucleic acid (“MNA”) (see, e.g., Leumann, CJ. Bioorg. & Med. Chem. 2002, 10, 841-854), fluoro HNA:

[chemical structure]

(“F-HNA”, see e.g. Swayze et al., U.S. Pat. No. 8,088,904; Swayze et al., U.S. Pat. No. 8,440,803; Swayze et al., U.S. Pat. No. 8,796,437; and Swayze et al., U.S. Pat. No. 9,005,906; F-HNA can also be referred to as a F-THP or 3-fluoro tetrahydropyran), and nucleosides comprising additional modified THP compounds having the formula:

[chemical structure]

wherein, independently, for each of said modified THP nucleoside:

[0243] Bx is a nucleobase moiety;

[0244] T₃ and T₄ are each, independently, an internucleoside linking group linking the modified THP nucleoside to the remainder of an oligonucleotide or one of T₃ and T₄ is an internucleoside linking group linking the modified THP nucleoside to the remainder of an oligonucleotide and the other of T₃ and T₄ is H, a hydroxyl protecting group, a linked conjugate group, or a 5′ or 3-terminal group;

q₁, q₂, q₃, q₄, q₅, q₆ and q₇ are each, independently, H, C₁-C₆ alkyl, substituted C₁-C₆ alkyl, C₂-C₆ alkenyl, substituted C₂-C₆ alkenyl, C₂-C₆ alkynyl, or substituted C₂-C₆ alkynyl; and

[0245] each of R₁ and R₂ is independently selected from among: hydrogen, halogen, substituted or unsubstituted alkoxy, NJ₁J₂, SJ₁, N₃, OC(═X)J₁, OC(═X)NJ₁J₂, NJ₃C(═X)NJ₁J₂, and CN, wherein X is O, S or NJ₁, and each J₁, J₂, and J₃ is, independently, H or C₁-C₆ alkyl.

[0246] In certain embodiments, modified THP nucleosides are provided wherein q₁, q₂, q₃, q₄, q₅, q₆ and q₇ are each H. In certain embodiments, at least one of q₁, q₂, q₃, q₄, q₅, q₆ and q₇ is other than H. In certain embodiments, at least one of q₁, q₂, q₃, q₄, q₅, q₆ and q₇ is methyl. In certain embodiments, modified THP nucleosides are provided wherein one of R₁ and R₂ is F. In certain embodiments, R₁ is F and R₂ is H, in certain embodiments, R₁ is methoxy and R₂ is H, and in certain embodiments, R₁ is methoxyethoxy and R₂ is H.

[0247] In certain embodiments, sugar surrogates comprise rings having more than 5 atoms and more than one heteroatom. For example, nucleosides comprising morpholino sugar moieties and their use in oligonucleotides have been reported (see, e.g., Braasch et al., Biochemistry, 2002, 41, 4503-4510 and Summerton et al., U.S. Pat. No. 5,698,685; Summerton et al., U.S. Pat. No. 5,166,315; Summerton et al., U.S. Pat. No. 5,185,444; and Summerton et al., U.S. Pat. No. 5,034,506). As used here, the term “morpholino” means a sugar surrogate having the following structure:

[chemical structure]

In certain embodiments, morpholinos may be modified, for example by adding or altering various substituent groups from the above morpholino structure. Such sugar surrogates are referred to herein as “modifed morpholinos.”

[0248] In certain embodiments, sugar surrogates comprise acyclic moieites. Examples of nucleosides and oligonucleotides comprising such acyclic sugar surrogates include but are not limited to: peptide nucleic acid (“PNA”), acyclic butyl nucleic acid (see, e.g., Kumar et al., Org. Biomol. Chem., 2013, 11, 5853-5865), and nucleosides and oligonucleotides described in Manoharan et al., WO2011/133876.

[0249] Many other bicyclic and tricyclic sugar and sugar surrogate ring systems are known in the art that can be used in modified nucleosides.

### 2. Certain Modified Nucleobases

[0250] In certain embodiments, modified oligonucleotides comprise one or more nucleoside comprising an unmodified nucleobase. In certain embodiments, modified oligonucleotides comprise one or more nucleoside comprising a modified nucleobase. In certain embodiments, modified oligonucleotides comprise one or more nucleoside that does not comprise a nucleobase, referred to as an abasic nucleoside.

[0251] In certain embodiments, modified nucleobases are selected from: 5-substituted pyrimidines, 6-azapyrimidines, alkyl or alkynyl substituted pyrimidines, alkyl substituted purines, and N-2, N-6 and O-6 substituted purines. In certain embodiments, modified nucleobases are selected from: 2-aminopropyladenine, 5-hydroxymethyl cytosine, xanthine, hypoxanthine, 2-aminoadenine, 6-N-methylguanine, 6-N-methyladenine, 2-propyladenine, 2-thiouracil, 2-thiothymine and 2-thiocytosine, 5-propynyl (—C≡C—CH₃) uracil, 5-propynylcytosine, 6-azouracil, 6-azocytosine, 6-azothymine, 5-ribosyluracil (pseudouracil), 4-thiouracil, 8-halo, 8-amino, 8-thiol, 8-thioalkyl, 8-hydroxyl, 8-aza and other 8-substituted purines, 5-halo, particularly 5-bromo, 5-trifluoromethyl, 5-halouracil, and 5-halocytosine, 7-methylguanine, 7-methyladenine, 2-F-adenine, 2-aminoadenine, 7-deazaguanine, 7-deazandenine, 3-deazaguanine, 3-deazaadenine, 6-N-benzoyladenine, 2-N-isobutyrylguanine, 4-N-benzoylcytosine, 4-N-benzoyluracil, 5-methyl 4-N-benzoylcytosine, 5-methyl 4-N-benzoyluracil, universal bases, hydrophobic bases, promiscuous bases, size-expanded bases, and fluorinated bases. Further modified nucleobases include tricyclic pyrimidines, such as 1,3-diazaphenoxazine-2-one, 1,3-diazaphenothiazine-2-one and 9-(2-aminoethoxy)-1,3-diazaphenoxazine-2-one (G-clamp). Modified nucleobases may also include those in which the purine or pyrimidine base is replaced with other heterocycles, for example 7-deaza-adenine, 7-deazaguanosine, 2-aminopyridine and 2-pyridone. Further nucleobases include those disclosed in Merigan et al., U.S. Pat. No. 3,687,808, those disclosed in The Concise Encyclopedia Of Polymer Science And Engineering, Kroschwitz, J. I., Ed., John Wiley & Sons, 1990, 858-859; Englisch et al., Angewandte Chemie, International Edition, 1991, 30,613; Sanghvi, Y. S., Chapter 15, Antisense Research and Applications, Crooke, S. T. and Lebleu, B., Eds., CRC Press, 1993, 273-288; and those disclosed in Chapters 6 and 15, Antisense Drug Technology, Crooke S. T., Ed., CRC Press, 2008, 163-166 and 442-443.

[0252] Publications that teach the preparation of certain of the above noted modified nucleobases as well as other modified nucleobases include without limitation, Manohara et al., US2003/0158403; Manoharan et al., US2003/0175906; Dinh et al., U.S. Pat. No. 4,845,205; Spielvogel et al., U.S. Pat. No. 5,130,302; Rogers et al., U.S. Pat. No. 5,134,066; Bischofberger et al., U.S. Pat. No. 5,175,273; Urdea et al., U.S. Pat. No. 5,367,066; Benner et al., U.S. Pat. No. 5,432,272; Matteucci et al., U.S. Pat. No. 5,434,257; Gmeiner et al., U.S. Pat. No. 5,457,187; Cook et al., U.S. Pat. No. 5,459,255; Froehler et al., U.S. Pat. No. 5,484,908; Matteucci et al., U.S. Pat. No. 5,502,177; Hawkins et al., U.S. Pat. No. 5,525,711; Haralambidis et al., U.S. Pat. No. 5,552,540; Cook et al., U.S. Pat. No. 5,587,469; Froehler et al., U.S. Pat. No. 5,594,121; Switzer et al., U.S. Pat. No. 5,596,091; Cook et al., U.S. Pat. No. 5,614,617; Froehler et al., U.S. Pat. No. 5,645,985; Cook et al., U.S. Pat. No. 5,681,941; Cook et al., U.S. Pat. No. 5,811,534; Cook et al., U.S. Pat. No. 5,750,692; Cook et al., U.S. Pat. No. 5,948,903; Cook et al., U.S. Pat. No. 5,587,470; Cook et al., U.S. Pat. No. 5,457,191; Matteucci et al., U.S. Pat. No. 5,763,588; Froehler et al., U.S. Pat. No. 5,830,653; Cook et al., U.S. Pat. No. 5,808,027; Cook et al., 6,166,199; and Matteucci et al., U.S. Pat. No. 6,005,096.

### 3. Certain Modified Internucleoside Linkages

[0253] In certain embodiments, nucleosides of modified oligonucleotides may be linked together using any internucleoside linkage. The two main classes of internucleoside linking groups are defined by the presence or absence of a phosphorus atom. Representative phosphorus-containing internucleoside linkages include but are not limited to phosphates, which contain a phosphodiester bond (“P=O”) (also referred to as unmodified or naturally occurring linkages), phosphotriesters, methylphosphonates, phosphoramidates, and phosphorothioates (“P=S”), and phosphorodithioates (“HS—P=S”). Representative non-phosphorus containing internucleoside linking groups include but are not limited to methylenemethylimino (—CH₂N(CH₃)—O—CH₂), thiodiester, thionocarbamate (—O—C(═O)(NH)—S—); siloxane (—O—SiH₂—O—); and N,N′-dimethylhydrazine (—CH₂—N(CH₃)—N(CH₃)—). Modified internucleoside linkages, compared to naturally occurring phosphate linkages, can be used to alter, typically increase, nuclease resistance of the oligonucleotide. In certain embodiments, internucleoside linkages having a chiral atom can be prepared as a racemic mixture, or as separate enantiomers. Methods of preparation of phosphorous-containing and non-phosphorous-containing internucleoside linkages are well known to those skilled in the art.

[0254] Representative internucleoside linkages having a chiral center include but are not limited to alkylphosphonates and phosphorothioates. Modified oligonucleotides comprising internucleoside linkages having a chiral center can be prepared as populations of modified oligonucleotides comprising stereorandom internucleoside linkages, or as populations of modified oligonucleotides comprising phosphorothioate linkages in particular stereochemical configurations. In certain embodiments, populations of modified oligonucleotides comprise phosphorothioate internucleoside linkages wherein all of the phosphorothioate internucleoside linkages are stereorandom. Such modified oligonucleotides can be generated using synthetic methods that result in random selection of the stereochemical configuration of each phosphorothioate linkage. Nonetheless, as is well understood by those of skill in the art, each individual phosphorothioate of each individual oligonucleotide molecule has a defined stereoconfiguration. In certain embodiments, populations of modified oligonucleotides are enriched for modified oligonucleotides comprising one or more particular phosphorothioate internucleoside linkages in a particular, independently selected stereochemical configuration. In certain embodiments, the particular configuration of the particular phosphorothioate linkage is present in at least 65% of the molecules in the population. In certain embodiments, the particular configuration of the particular phosphorothioate linkage is present in at least 70% of the molecules in the population. In certain embodiments, the particular configuration of the particular phosphorothioate linkage is present in at least 80% of the molecules in the population. In certain embodiments, the particular configuration of the particular phosphorothioate linkage is present in at least 90% of the molecules in the population. In certain embodiments, the particular configuration of the particular phosphorothioate linkage is present in at least 99% of the molecules in the population. Such chirally enriched populations of modified oligonucleotides can be generated using synthetic methods known in the art, e.g., methods described in Oka et al., JA CS 125, 8307 (2003), Wan et al. Nuc. Acid. Res. 42, 13456 (2014), and WO 2017/015555. In certain embodiments, a population of modified oligonucleotides is enriched for modified oligonucleotides having at least one indicated phosphorothioate in the (Sp) configuration. In certain embodiments, a population of modified oligonucleotides is enriched for modified oligonucleotides having at least one phosphorothioate in the (Rp) configuration. In certain embodiments, modified oligonucleotides comprising (Rp) and/or (Sp) phosphorothioates comprise one or more of the following formulas, respectively, wherein “B” indicates a nucleobase:

[chemical structure]

Unless otherwise indicated, chiral internucleoside linkages of modified oligonucleotides described herein can be stereorandom or in a particular stereochemical configuration.

[0255] Neutral internucleoside linkages include, without limitation, phosphotriesters, methylphosphonates, MMI (3′-CH₂N(CH₃)—O-5′), amide-3 (3′-CH₂—C(═O)—N(H)-5′), amide-4 (3′-CH₂N(H)—C(═O)-5′), formacetal (3′-O—CH₂—O-5′), methoxypropyl, and thioformacetal (3′-S—CH₂—)-5′). Further neutral internucleoside linkages include nonionic linkages comprising siloxane (dialkylsiloxane), carboxylate ester, carboxamide, sulfide, sulfonate ester and amides (See for example: Carbohydrate Modifications in Antisense Research; Y. S. Sanghvi and P. D. Cook, Eds., ACS Symposium Series 580; Chapters 3 and 4, 40-65). Further neutral internucleoside linkages include nonionic linkages comprising mixed N, O, S and CH₂ component parts.

### B. Certain Motifs

[0256] In certain embodiments, modified oligonucleotides comprise one or more modified nucleosides comprising a modified sugar moiety. In certain embodiments, modified oligonucleotides comprise one or more modified nucleosides comprising a modified nucleobase. In certain embodiments, modified oligonucleotides comprise one or more modified internucleoside linkage. In such embodiments, the modified, unmodified, and differently modified sugar moieties, nucleobases, and/or internucleoside linkages of a modified oligonucleotide define a pattern or motif. In certain embodiments, the patterns of sugar moieties, nucleobases, and internucleoside linkages are each independent of one another. Thus, a modified oligonucleotide may be described by its sugar motif, nucleobase motif and/or internucleoside linkage motif (as used herein, nucleobase motif describes the modifications to the nucleobases independent of the sequence of nucleobases).

### 1. Certain Sugar Motifs

[0257] In certain embodiments, oligonucleotides comprise one or more type of modified sugar and/or unmodified sugar moiety arranged along the oligonucleotide or region thereof in a defined pattern or sugar motif. In certain instances, such sugar motifs include but are not limited to any of the sugar modifications discussed herein.

[0258] In certain embodiments, modified oligonucleotides comprise or consist of a region having a gapmer motif, which is defined by two external regions or “wings” and a central or internal region or “gap.” The three regions of a gapmer motif (the 5′-wing, the gap, and the 3′-wing) form a contiguous sequence of nucleosides wherein at least some of the sugar moieties of the nucleosides of each of the wings differ from at least some of the sugar moieties of the nucleosides of the gap. Specifically, at least the sugar moieties of the nucleosides of each wing that are closest to the gap (the 3′-most nucleoside of the 5′-wing and the 5′-most nucleoside of the 3′-wing) differ from the sugar moiety of the neighboring gap nucleosides, thus defining the boundary between the wings and the gap (i.e., the wing/gap junction). In certain embodiments, the sugar moieties within the gap are the same as one another. In certain embodiments, the gap includes one or more nucleoside having a sugar moiety that differs from the sugar moiety of one or more other nucleosides of the gap. In certain embodiments, the sugar motifs of the two wings are the same as one another (symmetric gapmer). In certain embodiments, the sugar motif of the 5-wing differs from the sugar motif of the 3-wing (asymmetric gapmer).

[0259] In certain embodiments, the wings of a gapmer comprise 1-5 nucleosides. In certain embodiments, each nucleoside of each wing of a gapmer is a modified nucleoside. In certain embodiments, at least one nucleoside of each wing of a gapmer is a modified nucleoside. In certain embodiments, at least two nucleosides of each wing of a gapmer are modified nucleosides. In certain embodiments, at least three nucleosides of each wing of a gapmer are modified nucleosides. In certain embodiments, at least four nucleosides of each wing of a gapmer are modified nucleosides.

[0260] In certain embodiments, the gap of a gapmer comprises 7-12 nucleosides. In certain embodiments, each nucleoside of the gap of a gapmer is an unmodified 2′-deoxy nucleoside. In certain embodiments, at least one nucleoside of the gap of a gapmer is a modified nucleoside.

[0261] In certain embodiments, the gapmer is a deoxy gapmer. In certain embodiments, the nucleosides on the gap side of each wing/gap junction are unmodified 2′-deoxy nucleosides and the nucleosides on the wing sides of each wing/gap junction are modified nucleosides. In certain embodiments, each nucleoside of the gap is an unmodified 2′-deoxy nucleoside. In certain embodiments, each nucleoside of each wing of a gapmer is a modified nucleoside.

[0262] In certain embodiments, modified oligonucleotides comprise or consist of a region having a fully modified sugar motif. In such embodiments, each nucleoside of the fully modified region of the modified oligonucleotide comprises a modified sugar moiety. In certain embodiments, each nucleoside of the entire modified oligonucleotide comprises a modified sugar moiety. In certain embodiments, modified oligonucleotides comprise or consist of a region having a fully modified sugar motif, wherein each nucleoside within the fully modified region comprises the same modified sugar moiety, referred to herein as a uniformly modified sugar motif. In certain embodiments, a fully modified oligonucleotide is a uniformly modified oligonucleotide. In certain embodiments, each nucleoside of a uniformly modified comprises the same 2′-modification.

[0263] Herein, the lengths (number of nucleosides) of the three regions of a gapmer may be provided using the notation [#of nucleosides in the 5′-wing]-[#of nucleosides in the gap]-[#of nucleosides in the 3′-wing]. Thus, a 5-10-5 gapmer consists of 5 linked nucleosides in each wing and 10 linked nucleosides in the gap. Where such nomenclature is followed by a specific modification, that modification is the modification in each sugar moiety of each wing and the gap nucleosides comprise unmodified deoxynucleosides sugars. Thus, a 5-10-5 MOE gapmer consists of 5 linked MOE modified nucleosides in the 5′-wing, 10 linked deoxynucleosides in the gap, and 5 linked MOE nucleosides in the 3′-wing.

[0264] In certain embodiments, modified oligonucleotides are 5-10-5 MOE gapmers. In certain embodiments, modified oligonucleotides are 3-10-3 BNA gapmers. In certain embodiments, modified oligonucleotides are 3-10-3 cEt gapmers. In certain embodiments, modified oligonucleotides are 3-10-3 LNA gapmers.

### 2. Certain Nucleobase Motifs

[0265] In certain embodiments, oligonucleotides comprise modified and/or unmodified nucleobases arranged along the oligonucleotide or region thereof in a defined pattern or motif. In certain embodiments, each nucleobase is modified. In certain embodiments, none of the nucleobases are modified. In certain embodiments, each purine or each pyrimidine is modified. In certain embodiments, each adenine is modified. In certain embodiments, each guanine is modified. In certain embodiments, each thymine is modified. In certain embodiments, each uracil is modified. In certain embodiments, each cytosine is modified. In certain embodiments, some or all of the cytosine nucleobases in a modified oligonucleotide are 5-methyl cytosines. In certain embodiments, all of the cytosine nucleobases are 5-methyl cytosines and all of the other nucleobases of the modified oligonucleotide are unmodified nucleobases.

[0266] In certain embodiments, modified oligonucleotides comprise a block of modified nucleobases. In certain such embodiments, the block is at the 3′-end of the oligonucleotide. In certain embodiments the block is within 3 nucleosides of the 3′-end of the oligonucleotide. In certain embodiments, the block is at the 5′-end of the oligonucleotide. In certain embodiments the block is within 3 nucleosides of the 5′-end of the oligonucleotide.

[0267] In certain embodiments, oligonucleotides having a gapmer motif comprise a nucleoside comprising a modified nucleobase. In certain such embodiments, one nucleoside comprising a modified nucleobase is in the central gap of an oligonucleotide having a gapmer motif. In certain such embodiments, the sugar moiety of said nucleoside is a 2′-deoxyribosyl moiety. In certain embodiments, the modified nucleobase is selected from: a 2-thiopyrimidine and a 5-propynepyrimidine.

### 3. Certain Internucleoside Linkage Motifs

[0268] In certain embodiments, oligonucleotides comprise modified and/or unmodified internucleoside linkages arranged along the oligonucleotide or region thereof in a defined pattern or motif. In certain embodiments, each internucleoside linking group is a phosphodiester internucleoside linkage (P═O). In certain embodiments, each internucleoside linking group of a modified oligonucleotide is a phosphorothioate internucleoside linkage (P═S). In certain embodiments, each internucleoside linkage of a modified oligonucleotide is independently selected from a phosphorothioate internucleoside linkage and phosphodiester internucleoside linkage. In certain embodiments, each phosphorothioate internucleoside linkage is independently selected from a stereorandom phosphorothioate, a (Sp) phosphorothioate, and a (Rp) phosphorothioate. In certain embodiments, the sugar motif of a modified oligonucleotide is a gapmer and the internucleoside linkages within the gap are all modified. In certain such embodiments, some or all of the internucleoside linkages in the wings are unmodified phosphodiester internucleoside linkages. In certain embodiments, the terminal internucleoside linkages are modified. In certain embodiments, the sugar motif of a modified oligonucleotide is a gapmer, and the internucleoside linkage motif comprises at least one phosphodiester internucleoside linkage in at least one wing, wherein the at least one phosphodiester linkage is not a terminal internucleoside linkage, and the remaining internucleoside linkages are phosphorothioate internucleoside linkages. In certain such embodiments, all of the phosphorothioate linkages are stereorandom. In certain embodiments, all of the phosphorothioate linkages in the wings are (Sp) phosphorothioates, and the gap comprises at least one Sp, Sp, Rp motif. In certain embodiments, populations of modified oligonucleotides are enriched for modified oligonucleotides comprising such internucleoside linkage motifs.

### C. Certain Lengths

[0269] It is possible to increase or decrease the length of an oligonucleotide without eliminating activity. For example, in Woolf et al. (Proc. Natl. Acad. Sci. USA 89:7305-7309, 1992), a series of oligonucleotides 13-25 nucleobases in length were tested for their ability to induce cleavage of a target RNA in an oocyte injection model. Oligonucleotides 25 nucleobases in length with 8 or 11 mismatch bases near the ends of the oligonucleotides were able to direct specific cleavage of the target mRNA, albeit to a lesser extent than the oligonucleotides that contained no mismatches. Similarly, target specific cleavage was achieved using 13 nucleobase oligonucleotides, including those with 1 or 3 mismatches.

[0270] In certain embodiments, oligonucleotides (including modified oligonucleotides) can have any of a variety of ranges of lengths. In certain embodiments, oligonucleotides consist of X to Y linked nucleosides, where X represents the fewest number of nucleosides in the range and Y represents the largest number nucleosides in the range. In certain such embodiments, X and Y are each independently selected from 8, 9, 10, 11, 12, 13, 14, 15, 16, 17, 18, 19, 20, 21, 22, 23, 24, 25, 26, 27, 28, 29, 30, 31, 32, 33, 34, 35, 36, 37, 38, 39, 40, 41, 42, 43, 44, 45, 46, 47, 48, 49, and 50; provided that X≤Y. For example, in certain embodiments, oligonucleotides consist of 12 to 13, 12 to 14, 12 to 15, 12 to 16, 12 to 17, 12 to 18, 12 to 19, 12 to 20, 12 to 21, 12 to 22, 12 to 23, 12 to 24, 12 to 25, 12 to 26, 12 to 27, 12 to 28, 12 to 29, 12 to 30, 13 to 14, 13 to 15, 13 to 16, 13 to 17, 13 to 18, 13 to 19, 13 to 20, 13 to 21, 13 to 22, 13 to 23, 13 to 24, 13 to 25, 13 to 26, 13 to 27, 13 to 28, 13 to 29, 13 to 30, 14 to 15, 14 to 16, 14 to 17, 14 to 18, 14 to 19, 14 to 20, 14 to 21, 14 to 22, 14 to 23, 14 to 24, 14 to 25, 14 to 26, 14 to 27, 14 to 28, 14 to 29, 14 to 30, 15 to 16, 15 to 17, 15 to 18, 15 to 19, 15 to 20, 15 to 21, 15 to 22, 15 to 23, 15 to 24, 15 to 25, 15 to 26, 15 to 27, 15 to 28, 15 to 29, 15 to 30, 16 to 17, 16 to 18, 16 to 19, 16 to 20, 16 to 21, 16 to 22, 16 to 23, 16 to 24, 16 to 25, 16 to 26, 16 to 27, 16 to 28, 16 to 29, 16 to 30, 17 to 18, 17 to 19, 17 to 20, 17 to 21, 17 to 22, 17 to 23, 17 to 24, 17 to 25, 17 to 26, 17 to 27, 17 to 28, 17 to 29, 17 to 30, 18 to 19, 18 to 20, 18 to 21, 18 to 22, 18 to 23, 18 to 24, 18 to 25, 18 to 26, 18 to 27, 18 to 28, 18 to 29, 18 to 30, 19 to 20, 19 to 21, 19 to 22, 19 to 23, 19 to 24, 19 to 25, 19 to 26, 19 to 29, 19 to 28, 19 to 29, 19 to 30, 20 to 21, 20 to 22, 20 to 23, 20 to 24, 20 to 25, 20 to 26, 20 to 27, 20 to 28, 20 to 29, 20 to 30, 21 to 22, 21 to 23, 21 to 24, 21 to 25, 21 to 26, 21 to 27, 21 to 28, 21 to 29, 21 to 30, 22 to 23, 22 to 24, 22 to 25, 22 to 26, 22 to 27, 22 to 28, 22 to 29, 22 to 30, 23 to 24, 23 to 25, 23 to 26, 23 to 27, 23 to 28, 23 to 29, 23 to 30, 24 to 25, 24 to 26, 24 to 27, 24 to 28, 24 to 29, 24 to 30, 25 to 26, 25 to 27, 25 to 28, 25 to 29, 25 to 30, 26 to 27, 26 to 28, 26 to 29, 26 to 30, 27 to 28, 27 to 29, 27 to 30, 28 to 29, 28 to 30, or 29 to 30 linked nucleosides

### D. Certain Modified Oligionucleotides

[0271] In certain embodiments, the above modifications (sugar, nucleobase, internucleoside linkage) are incorporated into a modified oligonucleotide. In certain embodiments, modified oligonucleotides are characterized by their modification motifs and overall lengths. In certain embodiments, such parameters are each independent of one another. Thus, unless otherwise indicated, each internucleoside linkage of an oligonucleotide having a gapmer sugar motif may be modified or unmodified and may or may not follow the gapmer modification pattern of the sugar modifications. For example, the internucleoside linkages within the wing regions of a sugar gapmer may be the same or different from one another and may be the same or different from the internucleoside linkages of the gap region of the sugar motif. Likewise, such sugar gapmer oligonucleotides may comprise one or more modified nucleobase independent of the gapmer pattern of the sugar modifications. Unless otherwise indicated, all modifications are independent of nucleobase sequence.

### E. Certain Populations of Modified Oligonucleotides

[0272] Populations of modified oligonucleotides in which all of the modified oligonucleotides of the population have the same molecular formula can be stereorandom populations or chirally enriched populations. All of the chiral centers of all of the modified oligonucleotides are stereorandom in a stereorandom population. In a chirally enriched population, at least one particular chiral center is not stereorandom in the modified oligonucleotides of the population. In certain embodiments, the modified oligonucleotides of a chirally enriched population are enriched for β-D ribosyl sugar moieties, and all of the phosphorothioate internucleoside linkages are stereorandom. In certain embodiments, the modified oligonucleotides of a chirally enriched population are enriched for both β-D ribosyl sugar moieties and at least one, particular phosphorothioate internucleoside linkage in a particular stereochemical configuration.

### F. Nucleobase Sequence

[0273] In certain embodiments, oligonucleotides (unmodified or modified oligonucleotides) are further described by their nucleobase sequence. In certain embodiments oligonucleotides have a nucleobase sequence that is complementary to a second oligonucleotide or an identified reference nucleic acid, such as a target nucleic acid. In certain such embodiments, a region of an oligonucleotide has a nucleobase sequence that is complementary to a second oligonucleotide or an identified reference nucleic acid, such as a target nucleic acid. In certain embodiments, the nucleobase sequence of a region or entire length of an oligonucleotide is at least 50%, at least 60%, at least 70%, at least 80%, at least 85%, at least 90%, at least 95%, or 100% complementary to the second oligonucleotide or nucleic acid, such as a target nucleic acid.

### II. Certain Oligomeric Compounds

[0274] In certain embodiments, provided herein are oligomeric compounds, which consist of an oligonucleotide (modified or unmodified) and optionally one or more conjugate groups and/or terminal groups. Conjugate groups consist of one or more conjugate moiety and a conjugate linker which links the conjugate moiety to the oligonucleotide. Conjugate groups may be attached to either or both ends of an oligonucleotide and/or at any internal position. In certain embodiments, conjugate groups are attached to the 2′-position of a nucleoside of a modified oligonucleotide. In certain embodiments, conjugate groups that are attached to either or both ends of an oligonucleotide are terminal groups. In certain such embodiments, conjugate groups or terminal groups are attached at the 3′ and/or 5′-end of oligonucleotides. In certain such embodiments, conjugate groups (or terminal groups) are attached at the 3′-end of oligonucleotides. In certain embodiments, conjugate groups are attached near the 3′-end of oligonucleotides. In certain embodiments, conjugate groups (or terminal groups) are attached at the 5′-end of oligonucleotides. In certain embodiments, conjugate groups are attached near the 5′-end of oligonucleotides.

[0275] Examples of terminal groups include but are not limited to conjugate groups, capping groups, phosphate moieties, protecting groups, modified or unmodified nucleosides, and two or more nucleosides that are independently modified or unmodified.

### A. Certain Conjugate Groups

[0276] In certain embodiments, oligonucleotides are covalently attached to one or more conjugate groups. In certain embodiments, conjugate groups modify one or more properties of the attached oligonucleotide, including but not limited to pharmacodynamics, pharmacokinetics, stability, binding, absorption, tissue distribution, cellular distribution, cellular uptake, charge and clearance. In certain embodiments, conjugate groups impart a new property on the attached oligonucleotide, e.g., fluorophores or reporter groups that enable detection of the oligonucleotide. Certain conjugate groups and conjugate moieties have been described previously, for example: cholesterol moiety (Letsinger et al., Proc. Natl. Acad. Sci. USA, 1989, 86, 6553-6556), cholic acid (Manoharan et al., Bioorg. Med. Chem. Lett., 1994, 4, 1053-1060), a thioether, e.g., hexyl-S-tritylthiol (Manoharan et al., Ann. N. Y. Acad. Sci., 1992, 660, 306-309; Manoharan et al., Bioorg. Med. Chem. Lett., 1993, 3, 2765-2770), a thiocholesterl (Oberhauser et al., Nucl. Acids Res., 1992, 20, 533-538), an aliphatic chain, e.g., do-decan-diol or undecyl residues (Saison-Behmoaras et al., EMBO J., 1991, 10, 1111-1118; Kabanov et al., FEBS Lett., 1990, 259, 327-330; Svinarchuk et al., Biochimie, 1993, 75, 49-54), a phospholipid, e.g., di-hexadecyl-rac-glycerol or triethyl-ammonium 1,2-di-O-hexadecyl-rac-glycero-3-H-phosphonate (Manoharan et al., Tetrahedron Lett., 1995, 36, 3651-3654; Shea et al., Nucl. Acids Res., 1990, 18, 3777-3783), a polyamine or a polyethylene glycol chain (Manoharan et al., Nucleosides & Nucleotides, 1995, 14, 969-973), or adamantane acetic acid a palmityl moiety (Mishra et al., Biochim. Biophys. Aca, 1995, 1264, 229-237), an octadecylamine or hexylamino-carbonyl-oxycholesterl moiety (Crooke et al., J. Pharmacol. Exp. Ther., 1996, 277, 923-937), a tocopherol group (Nishina et al., Molecular Therapy Nucleic Acids, 2015, 4, e220; and Nishina et al., Molecular Therapy, 2008, 16, 734-740), or a GalNAc cluster (e.g., WO2014/179620).

### 1. Conjugate Moieties

[0277] Conjugate moieties include, without limitation, intercalators, reporter molecules, polyamines, polyamides, peptides, carbohydrates, vitamin moieties, polyethylene glycols, thioethers, polyethers, cholesterols, thiocholesterols, cholic acid moieties, folate, lipids, phospholipids, biotin, phenazine, phenanthridine, anthraquinone, adamantane, acridine, fluoresceins, rhodamines, coumarins, fluorophores, and dyes.

[0278] In certain embodiments, a conjugate moiety comprises an active drug substance, for example, aspirin, warfarin, phenylbutazone, ibuprofen, suprofen, fen-bufen, ketoprofen, (S)-(+)-pranopofen, carprofen, dansylsarcosine, 2,3,5-triiodobenzoic acid, fingolimod, flufenamic acid, folinic acid, a benzothiadiazide, chlorothiazide, a diazepine, indo-methicin, a barbiturate, a cephalosporin, a sulfa drug, an antidiabetic, an antibacterial or an antibiotic.

### 2. Conjinte Linkers

[0279] Conjugate moieties are attached to oligonucleotides through conjugate linkers. In certain oligomeric compounds, the conjugate linker is a single chemical bond (i.e., the conjugate moiety is attached directly to an oligonucleotide through a single bond). In certain embodiments, the conjugate linker comprises a chain structure, such as a hydrocarbyl chain, or an oligomer of repeating units such as ethylene glycol, nucleosides, or amino acid units.

[0280] In certain embodiments, a conjugate linker comprises one or more groups selected from alkyl, amino, oxo, amide, disulfide, polyethylene glycol, ether, thioether, and hydroxylamino. In certain such embodiments, the conjugate linker comprises groups selected from alkyl, amino, oxo, amide and ether groups. In certain embodiments, the conjugate linker comprises groups selected from alkyl and amide groups. In certain embodiments, the conjugate linker comprises groups selected from alkyl and ether groups. In certain embodiments, the conjugate linker comprises at least one phosphorus moiety. In certain embodiments, the conjugate linker comprises at least one phosphate group. In certain embodiments, the conjugate linker includes at least one neutral linking group.

[0281] In certain embodiments, conjugate linkers, including the conjugate linkers described above, are bifunctional linking moieties, e.g., those known in the art to be useful for attaching conjugate groups to parent compounds, such as the oligonucleotides provided herein. In general, a bifunctional linking moiety comprises at least two functional groups. One of the functional groups is selected to react with to a particular site on a parent compound and the other is selected to react with to a conjugate group. Examples of functional groups used in a bifunctional linking moiety include but are not limited to electrophiles for reacting with nucleophilic groups and nucleophiles for reacting with electrophilic groups. In certain embodiments, bifunctional linking moieties comprise one or more groups selected from amino, hydroxyl, carboxylic acid, thiol, alkyl, alkenyl, and alkynyl.

[0282] Examples of conjugate linkers include but are not limited to pyrrolidine, 8-amino-3,6-dioxaoctanoic acid (ADO), succinimidyl 4-(N-maleimidomethyl) cyclohexane-1-carboxylate (SMCC) and 6-aminohexanoic acid (AHEX or AHA). Other conjugate linkers include but are not limited to substituted or unsubstituted C₁-C₁₀ alkyl, substituted or unsubstituted C₁-C₁₀ alkenyl or substituted or unsubstituted C₂-C₁₀ alkynyl, wherein a nonlimiting list of preferred substituent groups includes hydroxyl, amino, alkoxy, carboxy, benzyl, phenyl, nitro, thiol, thioalkoxy, halogen, alkyl, aryl, alkenyl and alkynyl.

[0283] In certain embodiments, conjugate linkers comprise 1-10 linker-nucleosides. In certain embodiments, conjugate linkers comprise 2-5 linker-nucleosides. In certain embodiments, conjugate linkers comprise exactly 3 linker-nucleosides. In certain embodiments, conjugate linkers comprise the TCA motif. In certain embodiments, such linker-nucleosides are modified nucleosides. In certain embodiments such linker-nucleosides comprise a modified sugar moiety. In certain embodiments, linker-nucleosides are unmodified. In certain embodiments, linker-nucleosides comprise an optionally protected heterocyclic base selected from a purine, substituted purine, pyrimidine or substituted pyrimidine. In certain embodiments, a cleavable moiety is a nucleoside selected from uracil, thymine, cytosine, 4-N-benzoylcytosine, 5-methyl cytosine, 4-N-benzoyl-5-methyl cytosine, adenine, 6-N-benzoyladenine, guanine and 2-N-isobutyrylguanine. It is typically desirable for linker-nucleosides to be cleaved from the oligomeric compound after it reaches a target tissue. Accordingly, linker-nucleosides are typically linked to one another and to the remainder of the oligomeric compound through cleavable bonds. In certain embodiments, such cleavable bonds are phosphodiester bonds.

[0284] Herein, linker-nucleosides are not considered to be part of the oligonucleotide. Accordingly, in embodiments in which an oligomeric compound comprises an oligonucleotide consisting of a specified number or range of linked nucleosides and/or a specified percent complementarity to a reference nucleic acid and the oligomeric compound also comprises a conjugate group comprising a conjugate linker comprising linker-nucleosides, those linker-nucleosides are not counted toward the length of the oligonucleotide and are not used in determining the percent complementarity of the oligonucleotide for the reference nucleic acid. For example, an oligomeric compound may comprise (1) a modified oligonucleotide consisting of 8-30 nucleosides and (2) a conjugate group comprising 1-10 linker-nucleosides that are contiguous with the nucleosides of the modified oligonucleotide. The total number of contiguous linked nucleosides in such an oligomeric compound is more than 30. Alternatively, an oligomeric compound may comprise a modified oligonucleotide consisting of 8-30 nucleosides and no conjugate group. The total number of contiguous linked nucleosides in such an oligomeric compound is no more than 30. Unless otherwise indicated conjugate linkers comprise no more than 10 linker-nucleosides. In certain embodiments, conjugate linkers comprise no more than 5 linker-nucleosides. In certain embodiments, conjugate linkers comprise no more than 3 linker-nucleosides. In certain embodiments, conjugate linkers comprise no more than 2 linker-nucleosides. In certain embodiments, conjugate linkers comprise no more than 1 linker-nucleoside.

[0285] In certain embodiments, it is desirable for a conjugate group to be cleaved from the oligonucleotide. For example, in certain circumstances oligomeric compounds comprising a particular conjugate moiety are better taken up by a particular cell type, but once the oligomeric compound has been taken up, it is desirable that the conjugate group be cleaved to release the unconjugated or parent oligonucleotide. Thus, certain conjugate linkers may comprise one or more cleavable moieties. In certain embodiments, a cleavable moiety is a cleavable bond. In certain embodiments, a cleavable moiety is a group of atoms comprising at least one cleavable bond. In certain embodiments, a cleavable moiety comprises a group of atoms having one, two, three, four, or more than four cleavable bonds. In certain embodiments, a cleavable moiety is selectively cleaved inside a cell or subcellular compartment, such as a lysosome. In certain embodiments, a cleavable moiety is selectively cleaved by endogenous enzymes, such as nucleases.

[0286] In certain embodiments, a cleavable bond is selected from among: an amide, an ester, an ether, one or both esters of a phosphodiester, a phosphate ester, a carbamate, or a disulfide. In certain embodiments, a cleavable bond is one or both of the esters of a phosphodiester. In certain embodiments, a cleavable moiety comprises a phosphate or phosphodiester. In certain embodiments, the cleavable moiety is a phosphate linkage between an oligonucleotide and a conjugate moiety or conjugate group.

[0287] In certain embodiments, a cleavable moiety comprises or consists of one or more linker-nucleosides. In certain such embodiments, the one or more linker-nucleosides are linked to one another and/or to the remainder of the oligomeric compound through cleavable bonds. In certain embodiments, such cleavable bonds are unmodified phosphodiester bonds. In certain embodiments, a cleavable moiety is 2′-deoxy nucleoside that is attached to either the 3′ or 5′-terminal nucleoside of an oligonucleotide by a phosphate internucleoside linkage and covalently attached to the remainder of the conjugate linker or conjugate moiety by a phosphate or phosphorothioate linkage. In certain such embodiments, the cleavable moiety is 2′-deoxyadenosine.

### B. Certain Terminal Groups

[0288] In certain embodiments, oligomeric compounds comprise one or more terminal groups. In certain such embodiments, oligomeric compounds comprise a stabilized 5′-phophate. Stabilized 5′-phosphates include, but are not limited to 5′-phosphanates, including, but not limited to 5′-vinylphosphonates. In certain embodiments, terminal groups comprise one or more abasic nucleosides and/or inverted nucleosides. In certain embodiments, terminal groups comprise one or more 2′-linked nucleosides. In certain such embodiments, the 2′-linked nucleoside is an abasic nucleoside.

### III. Oligomeric Duplexes

[0289] In certain embodiments, oligomeric compounds described herein comprise an oligonucleotide, having a nucleobase sequence complementary to that of a target nucleic acid. In certain embodiments, an oligomeric compound is paired with a second oligomeric compound to form an oligomeric duplex. Such oligomeric duplexes comprise a first oligomeric compound having a region complementary to a target nucleic acid and a second oligomeric compound having a region complementary to the first oligomeric compound. In certain embodiments, the first oligomeric compound of an oligomeric duplex comprises or consists of (1) a modified or unmodified oligonucleotide and optionally a conjugate group and (2) a second modified or unmodified oligonucleotide and optionally a conjugate group. Either or both oligomeric compounds of an oligomeric duplex may comprise a conjugate group. The oligonucleotides of each oligomeric compound of an oligomeric duplex may include non-complementary overhanging nucleosides.

### IV. Antisense Activity

[0290] In certain embodiments, oligomeric compounds and oligomeric duplexes are capable of hybridizing to a target nucleic acid, resulting in at least one antisense activity; such oligomeric compounds and oligomeric duplexes are antisense compounds. In certain embodiments, antisense compounds have antisense activity when they reduce or inhibit the amount or activity of a target nucleic acid by 25% or more in the standard cell assay. In certain embodiments, antisense compounds selectively affect one or more target nucleic acid. Such antisense compounds comprise a nucleobase sequence that hybridizes to one or more target nucleic acid, resulting in one or more desired antisense activity and does not hybridize to one or more non-target nucleic acid or does not hybridize to one or more non-target nucleic acid in such a way that results in significant undesired antisense activity.

[0291] In certain antisense activities, hybridization of an antisense compound to a target nucleic acid results in recruitment of a protein that cleaves the target nucleic acid. For example, certain antisense compounds result in RNase H mediated cleavage of the target nucleic acid. RNase H is a cellular endonuclease that cleaves the RNA strand of an RNA:DNA duplex. The DNA in such an RNA:DNA duplex need not be unmodified DNA. In certain embodiments, described herein are antisense compounds that are sufficiently “DNA-like” to elicit RNase H activity. In certain embodiments, one or more non-DNA-like nucleoside in the gap of a gapmer is tolerated.

[0292] In certain antisense activities, an antisense compound or a portion of an antisense compound is loaded into an RNA-induced silencing complex (RISC), ultimately resulting in cleavage of the target nucleic acid. For example, certain antisense compounds result in cleavage of the target nucleic acid by Argonaute. Antisense compounds that are loaded into RISC are RNAi compounds. RNAi compounds may be double-stranded (siRNA) or single-stranded (ssRNA).

[0293] In certain embodiments, hybridization of an antisense compound to a target nucleic acid does not result in recruitment of a protein that cleaves that target nucleic acid. In certain embodiments, hybridization of the antisense compound to the target nucleic acid results in alteration of splicing of the target nucleic acid. In certain embodiments, hybridization of an antisense compound to a target nucleic acid results in inhibition of a binding interaction between the target nucleic acid and a protein or other nucleic acid. In certain embodiments, hybridization of an antisense compound to a target nucleic acid results in alteration of translation of the target nucleic acid.

[0294] Antisense activities may be observed directly or indirectly. In certain embodiments, observation or detection of an antisense activity involves observation or detection of a change in an amount of a target nucleic acid or protein encoded by such target nucleic acid, a change in the ratio of splice variants of a nucleic acid or protein and/or a phenotypic change in a cell or animal.

### V. Certain Target Nucleic Aids

[0295] In certain embodiments, oligomeric compounds comprise or consist of an oligonucleotide comprising a region that is complementary to a target nucleic acid. In certain embodiments, the target nucleic acid is an endogenous RNA molecule. In certain embodiments, the target nucleic acid encodes a protein. In certain such embodiments, the target nucleic acid is selected from: a mature mRNA and a pre-mRNA, including intronic, exonic and untranslated regions. In certain embodiments, the target RNA is a mature mRNA. In certain embodiments, the target nucleic acid is a pre-mRNA. In certain such embodiments, the target region is entirely within an intron. In certain embodiments, the target region spans an intron/exon junction. In certain embodiments, the target region is at least 50% within an intron. In certain embodiments, the target nucleic acid is the RNA transcriptional product of a retrogene. In certain embodiments, the target nucleic acid is a non-coding RNA. In certain such embodiments, the target non-coding RNA is selected from: a long non-coding RNA, a short non-coding RNA, an intronic RNA molecule.

### A. Complementarity/Mismatches to the Target Nucleic Acid

[0296] It is possible to introduce mismatch bases without eliminating activity. For example, Gautschi et al (J. Natl. Cancer Inst. 93:463471, March 2001) demonstrated the ability of an oligonucleotide having 100% complementarity to the bcl-2 mRNA and having 3 mismatches to the bcl-xL mRNA to reduce the expression of both bcl-2 and bcl-xL in vitro and in vivo. Furthermore, this oligonucleotide demonstrated potent anti-tumor activity in vivo. Maher and Dolnick (Nuc. Acid. Res. 16:3341-3358, 1988) tested a series of tandem 14 nucleobase oligonucleotides, and a 28 and 42 nucleobase oligonucleotides comprised of the sequence of two or three of the tandem oligonucleotides, respectively, for their ability to arrest translation of human DHFR in a rabbit reticulocyte assay. Each of the three 14 nucleobase oligonucleotides alone was able to inhibit translation, albeit at a more modest level than the 28 or 42 nucleobase oligonucleotides.

[0297] In certain embodiments, oligonucleotides are complementary to the target nucleic acid over the entire length of the oligonucleotide. In certain embodiments, oligonucleotides are 99%, 95%, 90%, 85%, or 80% complementary to the target nucleic acid. In certain embodiments, oligonucleotides are at least 80% complementary to the target nucleic acid over the entire length of the oligonucleotide and comprise a region that is 100% or fully complementary to a target nucleic acid. In certain embodiments, the region of full complementarity is from 6 to 20, 10 to 18, or 18 to 20 nucleobases in length.

[0298] In certain embodiments, oligonucleotides comprise one or more mismatched nucleobases relative to the target nucleic acid. In certain embodiments, antisense activity against the target is reduced by such mismatch, but activity against a non-target is reduced by a greater amount. Thus, in certain embodiments selectivity of the oligonucleotide is improved. In certain embodiments, the mismatch is specifically positioned within an oligonucleotide having a gapmer motif. In certain embodiments, the mismatch is at position 1, 2, 3, 4, 5, 6, 7, or 8 from the 5′-end of the gap region. In certain embodiments, the mismatch is at position 9, 8, 7, 6, 5, 4, 3, 2, 1 from the 3′-end of the gap region. In certain embodiments, the mismatch is at position 1, 2, 3, or 4 from the 5′-end of the wing region. In certain embodiments, the mismatch is at position 4, 3, 2, or 1 from the 3′-end of the wing region.

### B. ATXN2

[0299] In certain embodiments, oligomeric compounds comprise or consist of an oligonucleotide comprising a region that is complementary to a target nucleic acid, wherein the target nucleic acid is ATXN2. In certain embodiments, ATXN2 nucleic acid has the sequence set forth in SEQ ID NO: 1 (GENBANK Accession No: NM_002973.3) and SEQ ID NO: 2 (the complement of GENBANK Accession No: NT_009775.17 truncated from nucleotides 2465000 to 2616000).

[0300] In certain embodiments, contacting a cell with an oligomeric compound complementary to SEQ ID NO: 1 or SEQ ID NO: 2 reduces the amount of ATXN2 mRNA, and in certain embodiments reduces the amount of Ataxin-2 protein. In certain embodiments, the oligomeric compound consists of a modified oligonucleotide. In certain embodiments, contacting a cell with an oligomeric compound complementary to SEQ ID NO: 1 or SEQ ID NO: 2 ameliorates one or more symptom or hallmark of a neurodegenerative disease. In certain embodiments, the oligomeric compound consists of a modified oligonucleotide. In certain embodiments, the symptom or hallmark is ataxia, neuropathy, or aggregate formation. In certain embodiments, contacting a cell with a modified oligonucleotide complementary to SEQ ID NO: 1 or SEQ ID NO: 2 results in improved motor function, reduced neuropathy, and reduction in number of aggregates. In certain embodiments, the oligomeric compound consists of a modified oligonucleotide.

### C. Certain Target Nucleic Acids in Certain Tissues

[0301] In certain embodiments, oligomeric compounds comprise or consist of an oligonucleotide comprising a region that is complementary to a target nucleic acid, wherein the target nucleic acid is expressed in a pharmacologically relevant tissue. In certain embodiments, the pharmacologically relevant tissues are the cells and tissues that comprise the central nervous system (CNS). Such tissues include brain tissues, such as, cortex, spinal cord, hippocampus, pons, cerebellum, substantia nigra, red nucleus, medulla, thalamus, and dorsal root ganglia.

### VI. Certain Pharmaceutical Compositions

[0302] In certain embodiments, described herein are pharmaceutical compositions comprising one or more oligomeric compounds. In certain embodiments, the one or more oligomeric compounds each consists of a modified oligonucleotide. In certain embodiments, the pharmaceutical composition comprises a pharmaceutically acceptable diluent or carrier. In certain embodiments, a pharmaceutical composition comprises or consists of a sterile saline solution and one or more oligomeric compound. In certain embodiments, the sterile saline is pharmaceutical grade saline. In certain embodiments, a pharmaceutical composition comprises or consists of one or more oligomeric compound and sterile water. In certain embodiments, the sterile water is pharmaceutical grade water. In certain embodiments, a pharmaceutical composition comprises or consists of one or more oligomeric compound and phosphate-buffered saline (PBS). In certain embodiments, the sterile PBS is pharmaceutical grade PBS. In certain embodiments, a pharmaceutical composition comprises or consists of one or more oligomeric compound and artificial cerebrospinal fluid. In certain embodiments, the artificial cerebrospinal fluid is pharmaceutical grade.

[0303] In certain embodiments, a pharmaceutical composition comprises a modified oligonucleotide and artificial cerebrospinal fluid. In certain embodiments, a pharmaceutical composition consists of a modified oligonucleotide and artificial cerebrospinal fluid. In certain embodiments, a pharmaceutical composition consists essentially of a modified oligonucleotide and artificial cerebrospinal fluid. In certain embodiments, the artificial cerebrospinal fluid is pharmaceutical grade.

[0304] In certain embodiments, pharmaceutical compositions comprise one or more oligomeric compound and one or more excipients. In certain embodiments, excipients are selected from water, salt solutions, alcohol, polyethylene glycols, gelatin, lactose, amylase, magnesium stearate, talc, silicic acid, viscous paraffin, hydroxymethylcellulose and polyvinylpyrrolidone.

[0305] In certain embodiments, oligomeric compounds may be admixed with pharmaceutically acceptable active and/or inert substances for the preparation of pharmaceutical compositions or formulations. Compositions and methods for the formulation of pharmaceutical compositions depend on a number of criteria, including, but not limited to, route of administration, extent of disease, or dose to be administered.

[0306] In certain embodiments, pharmaceutical compositions comprising an oligomeric compound encompass any pharmaceutically acceptable salts of the oligomeric compound, esters of the oligomeric compound, or salts of such esters. In certain embodiments, pharmaceutical compositions comprising oligomeric compounds comprising one or more oligonucleotide, upon administration to an animal, including a human, are capable of providing (directly or indirectly) the biologically active metabolite or residue thereof. Accordingly, for example, the disclosure is also drawn to pharmaceutically acceptable salts of oligomeric compounds, prodrugs, pharmaceutically acceptable salts of such prodrugs, and other bioequivalents. Suitable pharmaceutically acceptable salts include, but are not limited to, sodium and potassium salts. In certain embodiments, prodrugs comprise one or more conjugate group attached to an oligonucleotide, wherein the conjugate group is cleaved by endogenous nucleases within the body.

[0307] Lipid moieties have been used in nucleic acid therapies in a variety of methods. In certain such methods, the nucleic acid, such as an oligomeric compound, is introduced into preformed liposomes or lipoplexes made of mixtures of cationic lipids and neutral lipids. In certain methods, DNA complexes with mono- or poly-cationic lipids are formed without the presence of a neutral lipid. In certain embodiments, a lipid moiety is selected to increase distribution of a pharmaceutical agent to a particular cell or tissue. In certain embodiments, a lipid moiety is selected to increase distribution of a pharmaceutical agent to fat tissue. In certain embodiments, a lipid moiety is selected to increase distribution of a pharmaceutical agent to muscle tissue.

[0308] In certain embodiments, pharmaceutical compositions comprise a delivery system. Examples of delivery systems include, but are not limited to, liposomes and emulsions. Certain delivery systems are useful for preparing certain pharmaceutical compositions including those comprising hydrophobic compounds. In certain embodiments, certain organic solvents such as dimethylsulfoxide are used.

[0309] In certain embodiments, pharmaceutical compositions comprise one or more tissue-specific delivery molecules designed to deliver the one or more pharmaceutical agents of the present invention to specific tissues or cell types. For example, in certain embodiments, pharmaceutical compositions include liposomes coated with a tissue-specific antibody.

[0310] In certain embodiments, pharmaceutical compositions comprise a co-solvent system. Certain of such co-solvent systems comprise, for example, benzyl alcohol, a nonpolar surfactant, a water-miscible organic polymer, and an aqueous phase. In certain embodiments, such co-solvent systems are used for hydrophobic compounds. A non-limiting example of such a co-solvent system is the VPD co-solvent system, which is a solution of absolute ethanol comprising 3% w/v benzyl alcohol, 8% w/v of the nonpolar surfactant Polysorbate 80™ and 65% w/v polyethylene glycol 300. The proportions of such co-solvent systems may be varied considerably without significantly altering their solubility and toxicity characteristics. Furthermore, the identity of co-solvent components may be varied: for example, other surfactants may be used instead of Polysorbate 80™; the fraction size of polyethylene glycol may be varied; other biocompatible polymers may replace polyethylene glycol, e.g., polyvinyl pyrrolidone; and other sugars or polysaccharides may substitute for dextrose.

[0311] In certain embodiments, pharmaceutical compositions are prepared for oral administration. In certain embodiments, pharmaceutical compositions are prepared for buccal administration. In certain embodiments, a pharmaceutical composition is prepared for administration by injection (e.g., intravenous, subcutaneous, intramuscular, intrathecal (IT), intracerebroventricular (ICV), etc.). In certain of such embodiments, a pharmaceutical composition comprises a carrier and is formulated in aqueous solution, such as water or physiologically compatible buffers such as Hanks's solution, Ringer's solution, or physiological saline buffer. In certain embodiments, other ingredients are included (e.g., ingredients that aid in solubility or serve as preservatives). In certain embodiments, injectable suspensions are prepared using appropriate liquid carriers, suspending agents and the like. Certain pharmaceutical compositions for injection are presented in unit dosage form, e.g., in ampoules or in multi-dose containers. Certain pharmaceutical compositions for injection are suspensions, solutions or emulsions in oily or aqueous vehicles, and may contain formulatory agents such as suspending, stabilizing and/or dispersing agents. Certain solvents suitable for use in pharmaceutical compositions for injection include, but are not limited to, lipophilic solvents and fatty oils, such as sesame oil, synthetic fatty acid esters, such as ethyl oleate or triglycerides, and liposomes.

[0312] Under certain conditions, certain compounds disclosed herein act as acids. Although such compounds may be drawn or described in protonated (free acid) form, in ionized (anion) form, or ionized and in association with a cation (salt) form, aqueous solutions of such compounds exist in equilibrium among such forms. For example, a phosphate linkage of an oligonucleotide in aqueous solution exists in equilibrium among free acid, anion, and salt forms. Unless otherwise indicated, compounds described herein are intended to include all such forms. Moreover, certain oligonucleotides have several such linkages, each of which is in equilibrium. Thus, oligonucleotides in solution exist in an ensemble of forms at multiple positions all at equilibrium. The term “oligonucleotide” is intended to include all such forms. Drawn structures necessarily depict a single form. Nevertheless, unless otherwise indicated, such drawings are likewise intended to include corresponding forms. Herein, a structure depicting the free acid of a compound followed by the term “or salts thereof” expressly includes all such forms that may be fully or partially protonated/de-protonated/in association with a cation. In certain instances, one or more specific cation is identified.

[0313] In certain embodiments, oligomeric compounds disclosed herein are in aqueous solution with sodium. In certain embodiments, oligomeric compounds are in aqueous solution with potassium. In certain embodiments, oligomeric compounds are in artificial CSF. In certain embodiments, oligomeric compounds are in PBS. In certain embodiments, oligomeric compounds are in water. In certain such embodiments, the pH of the solution is adjusted with NaOH and/or HCl to achieve a desired pH.

### VII. Certain Compositions

### 1. Compound No: 874218

[0314] Compound No: 874218 may be characterized as a 5-10-5 MOE gapmer, having a sequence of (from 5′ to 3′) GTACTITTCTCATGTGCGGC (incorporated herein as SEQ ID NO: 1714), wherein each of nucleosides 1-5 and 16-20 (from 5′ to 3′) comprise a 2′-MOE modification and each of nucleosides 6-15 are 2′-deoxynucleosides, wherein the internucleoside linkages between nucleosides 2 to 3, 3 to 4, 4 to 5, 5 to 6, 16 to 17, and 17 to 18 are phosphodiester internucleoside linkages and the internucleoside linkages between nucleosides 1 to 2, 6 to 7, 7 to 8, 8 to 9, 9 to 10, 10 to 11, 11 to 12, 12 to 13, 13 to 14, 14 to 15, 15 to 16, 18 to 19, and 19 to 20 are phosphorothioate internucleoside linkages, and wherein each cytosine is a 5-methyl cytosine.

[0315] Compound No: 874218 may be characterized by the following chemical notation: Ges Teo Aeo mCeo Teo Tds Tds Tds mCds Tds mCds Ads Tds Gds Tds Geo mCeo Ges Ges mCe (SEQ ID NO: 3320); wherein,

[0316] A=an adenine nucleobase,

[0317] mC=a 5-methyl cytosine nucleobase,

[0318] G=a guanine nucleobase,

[0319] T=a thymine nucleobase,

[0320] e=a 2′-MOE modified sugar,

[0321] d=a 2′-deoxyribose sugar,

[0322] s=a phosphorothioate internucleoside linkage, and

[0323] o=a phosphodiester internucleoside linkage.

[0324] Compound No: 874218 may be represented by the following chemical structure:

[chemical structure]

[0325] In certain embodiments, the sodium salt of Compound No: 874218 may be represented by the following chemical structure:

[chemical structure]

### Structure 2. The Sodium Salt of Compound No. 874218

### 2. Compound No: 1008854

[0326] Compound No: 1008854 may be characterized as a4-10-6 MOE gapmer, having a sequence of (from 5′ to 3′) CTGCTAACTGGTITGCCCTT (incorporated herein as SEQ ID NO: 1255), wherein each of nucleosides 1-4 and 15-20 (from 5′ to 3′) comprise a 2′-MOE modification and each of nucleosides 5-14 are 2′-deoxynucleosides, wherein the internucleoside linkages between nucleosides 2 to 3, 3 to 4, 4 to 5, 15 to 16, 16 to 17, 17 to 18 are phosphodiester internucleoside linkages and the internucleoside linkages between nucleosides 1 to 2, 5 to 6, 6 to 7, 7 to 8, 8 to 9, 9 to 10, 10 to 11, 11 to 12, 12 to 13, 13 to 14, 14 to 15, 18 to 19, and 19 to 20 are phosphorothioate internucleoside linkages, and wherein each cytosine is a 5-methyl cytosine.

[0327] Compound No: 1008854 may be characterized by the following chemical notation: mCes Teo Geo mCeo Tds Ads Ads mCds Tds Gds Gds Tds Tds Tds Geo mCeo mCeo mCes Tes Te (SEQ ID NO: 3321); wherein,

[0328] A=an adenine nucleobase,

[0329] mC=a 5-methyl cytosine nucleobase,

[0330] G=a guanine nucleobase,

[0331] T=a thymine nucleobase,

[0332] e=a 2′-MOE modified sugar,

[0333] d=a 2′-deoxyribose sugar,

[0334] s=a phosphorothioate internucleoside linkage, and

[0335] o=a phosphodiester internucleoside linkage.

[0336] Compound No: 1008854 may be represented by the following chemical structure:

[chemical structure]

### Structure 3. Compound No. 1008854

[0337] In certain embodiments, the sodium salt of Compound No: 1008854 may be represented by the following chemical structure:

[chemical structure]

### Structure 4. Sodium Salt of Compound No. 1008854

### 3. Compound No: 1008862

[0338] Compound No: 1008862 may be characterized as a 6-10-4 MOE gapmer, having a sequence of (from 5′ to 3′) TGTACTTCACATITGGAGCC (incorporated herein as SEQ ID NO: 1185), wherein each of nucleosides 1-6 and 17-20 (from 5′ to 3′) comprise a 2′-MOE modification and each of nucleosides 7-16 are 2′-deoxynucleosides, wherein the internucleoside linkages between nucleosides 2 to 3, 3 to 4, 4 to 5, 5 to 6, 6 to 7, and 17 to 18 are phosphodiester internucleoside linkages and the internucleoside linkages between nucleosides 1 to 2, 7 to 8, 8 to 9, 9 to 10, 10 to 11, 11 to 12, 12 to 13, 13 to 14, 14 to 15, 15 to 16, 16 to 17, 18 to 19, and 19 to 20 are phosphorothioate internucleoside linkages, and wherein each cytosin is a 5-methyl cytosine.

[0339] Compound No: 1008862 may be characterized by the following chemical notation: Tes Geo Teo Aeo mCeo Teo Tds mCds Ads mCds Ads Tds Tds Tds Gds Gds Aeo Ges mCes mCe (SEQ ID NO: 3322); wherein,

[0340] A=an adenine nucleobase,

[0341] mC=a 5-methyl cytosine nucleobase,

[0342] G=a guanine nucleobase,

[0343] T=a thymine nucleobase,

[0344] e=a 2′-MOE modified sugar,

[0345] d=a 2′-deoxyribose sugar,

[0346] s=a phosphorothioate internucleoside linkage, and

[0347] o=a phosphodiester internucleoside linkage.

[0348] Compound No: 1008862 may be represented by the following chemical structure:

[chemical structure]

### Structure 5. Compound No. 1008862

[0349] In certain embodiments, the sodium salt of Compound No: 1008862 may be represented by the following chemical structure:

[chemical structure]

### Structure 6. The Sodium Salt of Compound No. 1008862

### 4. Compound No: 1008870

[0350] Compound No: 1008870 may be characterized as a 6-10-4 MOE gapmer, having a sequence of (from 5′ to 3′) TGGATTCTGTACTTTTCTCA (incorporated herein as SEQ ID NO: 3235), wherein each of nucleosides 1-6 and 17-20 (from 5′ to 3′) comprise a 2′-MOE modification and each of nucleosides 7-16 are 2′-deoxynucleosides, wherein the internucleoside linkages between nucleosides 2 to 3, 3 to 4, 4 to 5, 5 to 6, 6 to 7, and 17 to 18, are phosphodiester internucleoside linkages and the internucleoside linkages between nucleosides 1 to 2, 7 to 8, 8 to 9, 9 to 10, 10 to 11, 11 to 12, 12 to 13, 13 to 14, 14 to 15, 15 to 16, 16 to 17, 18 to 19, and 19 to 20 are phosphorothioate internucleoside linkages, and wherein each cytosine is a 5-methyl cytosine.

[0351] Compound No: 1008870 may be characterized by the following chemical notation: Tes Geo Geo Aeo Teo Teo mCds Tds Gds Tds Ads mCds Tds Tds Tds Tds mCeo Tes mCes Ae (SEQ ID NO: 3323); wherein,

[0352] A=an adenine nucleobase,

[0353] mC=a 5-methyl cytosine nucleobase,

[0354] G=a guanine nucleobase,

[0355] T=a thymine nucleobase,

[0356] e=a 2′-MOE modified sugar,

[0357] d=a 2′-deoxyribose sugar,

[0358] s=a phosphorothioate internucleoside linkage, and

[0359] o=a phosphodiester internucleoside linkage.

[0360] Compound No: 1008870 may be represented by the following chemical structure:

[chemical structure]

### Structure 7. Compound No. 1008870

[0361] In certain embodiments, the sodium salt of Compound No: 1008870 may be represented by the following chemical structure:

[chemical structure]

### Structure 8. The Sodium Salt of Compound No. 1008870

### 5. Compound No: 1008874

[0362] Compound No: 1008874 may be characterized as a 6-10-4 MOE gapmer, having a sequence of (from 5′ to 3′) CCTATCATCATTTTCCAGGG (incorporated herein as SEQ ID NO: 158), wherein each of nucleosides 1-6 and 17-20 (from 5′ to 3′) comprise a 2′-MOE modification and each of nucleosides 7-16 are 2′-deoxynucleosides, wherein the internucleoside linkages between nucleosides 2 to 3, 3 to 4, 4 to 5, 5 to 6, 6 to 7, and 17 to 18 are phosphodiester internucleoside linkages and the internucleoside linkages between nucleosides 1 to 2, 7 to 8, 8 to 9, 9 to 10, 10 to 11, 11 to 12, 12 to 13, 13 to 14, 14 to 15, 15 to 16, 16 to 17, 18 to 19, and 19 to 20 are phosphorothioate internucleoside linkages, and wherein each cytosine is a 5-methyl cytosine.

[0363] Compound No: 1008874 may be characterized by the following chemical notation: mCes mCeo Teo Aeo Teo mCeo Ads Tds mCds Ads Tds Tds Tds Tds mCds mCds Aeo Ges Ges Ge (SEQ ID NO: 3324); wherein,

[0364] A=an adenine nucleobase,

[0365] mC=a 5-methyl cytosine nucleobase,

[0366] G=a guanine nucleobase,

[0367] T=a thymine nucleobase,

[0368] e=a 2′-MOE modified sugar,

[0369] d=a 2′-deoxyribose sugar,

[0370] s=a phosphorothioate internucleoside linkage, and

[0371] o=a phosphodiester internucleoside linkage.

[0372] Compound No: 1008874 may be represented by the following chemical structure:

[chemical structure]

### Structure 9. Compound No. 1008874

[0373] In certain embodiments, the sodium salt of Compound No: 1008874 may be represented by the following chemical structure:

[chemical structure]

### Structure 10. Sodium Salt of Compound No. 1008874

### 6. Compound No: 1008910

[0374] Compound No: 1008910 may be characterized as a 5-10-5 MOE gapmer, having a sequence of (from 5′ to 3′) TCTGTACTTTTCTCATGTGC (incorporated herein as SEQ ID NO: 254), wherein each of nucleosides 1-5 and 16-20 (from 5′ to 3′) comprise a 2′-MOE modification and each of nucleosides 6-15 are 2′-deoxynucleosides, wherein the internucleoside linkages between nucleosides 2 to 3, 3 to 4, 4 to 5, 16 to 17, and 17 to 18 are phosphodiester internucleoside linkages and the internucleoside linkages between nucleosides 1 to 2, 5 to 6, 6 to 7, 7 to 8, 8 to 9, 9 to 10, 10 to 11, 11 to 12, 12 to 13, 13 to 14, 14 to 15, 15 to 16, 18 to 19, and 19 to 20 are phosphorothioate internucleoside linkages, and wherein each cytosine is a 5-methyl cytosine.

[0375] Compound No: 1008910 may be characterized by the following chemical notation: Tes mCeo Teo Geo Tes Ads mCds Tds Tds Tds Tds mCds Tds mCds Ads Teo Geo Tes Ges mCe (SEQ ID NO: 3325); wherein,

[0376] A=an adenine nucleobase,

[0377] mC=a 5-methyl cytosine nucleobase,

[0378] G=a guanine nucleobase,

[0379] T=a thymine nucleobase,

[0380] e=a 2′-MOE modified sugar,

[0381] d=a 2′-deoxyribose sugar,

[0382] s=a phosphorothioate internucleoside linkage, and

[0383] o=a phosphodiester internucleoside linkage.

[0384] Compound No: 1008910 may be represented by the following chemical structure:

[chemical structure]

### Structure 11. Compound No. 1008910

[0385] In certain embodiments, the sodium salt of Compound No: 1008910 may be represented by the following chemical structure:

[chemical structure]

### Structure 12. The Sodium Salt of Compound No. 1008910

### VIII. Certain Comparator Compositions

[0386] In certain embodiments, Compound No. 564122, which was previously described in WO 2015/143246 and in Scoles et al., Nature, 2017, 544(7650):362-366 (both of which are incorporated herein by reference) is a comparator compound. Compound No. 564122 is a 5-10-5 MOE gapmer, having a sequence from (from 5′ to 3′) TGCATAGATTCCATCAAAAG (incorporated herein as SEQ ID NO: 67), wherein each cytosine is a 5-methylcytosine, each internucleoside linkage is a phosphorothioate internucleoside linkage, and each of nucleosides 1-5 and 16-20 comprise a 2′-OCH₂CH₂OCH₃ group.

[0387] In certain embodiments, Compound No. 564127, which was previously described in WO 2015/143246 and in Scoles, 2017 is a comparator compound. Compound No. 564127 is a 5-10-5 MOE gapmer, having a sequence from (from 5′ to 3′) CTCTCCATTATTTCTTCACG (incorporated herein as SEQ ID NO: 33), wherein each cytosine is a 5-methylcytosine, each internucleoside linkage is a phosphorothioate internucleoside linkage, and each of nucleosides 1-5 and 16-20 comprise a 2′-OCH₂CH₂OCH₃ group.

[0388] In certain embodiments, Compound No. 564133, which was previously described in WO 2015/143246 and in Scoles, 2017 is a comparator compound. Compound No. 564133 is a 5-10-5 MOE gapmer, having a sequence from (from 5′ to 3′) GCTAACTGGTTTGCCCTTGC (incorporated herein as SEQ ID NO: 32), wherein each cytosine is a 5-methylcytosine, each internucleoside linkage is a phosphorothioate internucleoside linkage, and each of nucleosides 1-5 and 16-20 comprise a 2′-OCH₂CH₂OCH₃ group.

[0389] In certain embodiments, Compound No. 564143, which was previously described in WO 2015/143246 and in Scoles, 2017 is a comparator compound. Compound No. 564143 is a 5-10-5 MOE gapmer, having a sequence from (from 5′ to 3′) GGAGCTGGAGAACCATGAGC (incorporated herein as SEQ ID NO: 188), wherein each cytosine is a 5-methylcytosine, each internucleoside linkage is a phosphorothioate internucleoside linkage, and each of nucleosides 1-5 and 16-20 comprise a 2′-OCH₂CH₂OCH₃ group.

[0390] In certain embodiments, Compound No. 564150, which was previously described in WO 2015/143246 and in Scoles, 2017 is a comparator compound. Compound No. 564150 is a 5-10-5 MOE gapmer, having a sequence from (from 5′ to 3′) CTGGTACAGTTGCTGCTGCT (incorporated herein as SEQ ID NO: 330), wherein each cytosine is a 5-methylcytosine, each internucleoside linkage is a phosphorothioate internucleoside linkage, and each of nucleosides 1-5 and 16-20 comprise a 2′-OCH₂CH₂OCH₃ group.

[0391] In certain embodiments, Compound No. 564188, which was previously described in WO 2015/143246 and in Scoles, 2017 is a comparator compound. Compound No. 564188 is a 5-10-5 MOE gapmer, having a sequence from (from 5′ to 3′) CCCAAAGGGTTAATTAGGAT (incorporated herein as SEQ ID NO: 2901), wherein each cytosine is a 5-methylcytosine, each internucleoside linkage is a phosphorothioate internucleoside linkage, and each of nucleosides 1-5 and 16-20 comprise a 2′-OCH₂CH₂OCH₃ group.

[0392] In certain embodiments, Compound No. 564210, which was previously described in WO 2015/143246 and in Scoles, 2017 is a comparator compound. Compound No. 564210 is a 5-10-5 MOE gapmer, having a sequence from (from 5′ to 3′) CCCATACGCGGTGAATTCTG (incorporated herein as SEQ ID NO: 112), wherein each cytosine is a 5-methylcytosine, each internucleoside linkage is a phosphorothioate internucleoside linkage, and each of nucleosides 1-5 and 16-20 comprise a 2′-OCH₂CH₂OCH₃ group.

[0393] In certain embodiments, Compound No. 564216, which was previously described in WO 2015/143246 and in Scoles, 2017 is a comparator compound. Compound No. 564216 is a 5-10-5 MOE gapmer, having a sequence from (from 5′ to 3′) GTGGGATACAAATTCTAGGC (incorporated herein as SEQ ID NO: 190), wherein each cytosine is a 5-methylcytosine, each internucleoside linkage is a phosphorothioate internucleoside linkage, and each of nucleosides 1-5 and 16-20 comprise a 2′-OCH₂CH₂OCH₃ group.

[0394] In certain embodiments, compounds described herein are superior relative to compounds described in WO 2015/143246 and in Scoles, 2017 because they demonstrate one or more improved properties.

### Compound 874218

[0395] For example, as provided in Example 13 (hereinbelow), Compound 874218 demonstrated a functional observational battery (FOB) score of 1.00 in wild-type mice whereas each of Comparator Compounds Nos: 564122, 564127, 564133, 564143, 564150, 564188, 564210, and 564216 demonstrated a FOB score of 7.00. Therefore, Compound 874218 is demonstrably more tolerable than each of Comparator Compounds Nos: 564122, 564127, 564133, 564143, 564150, 564188, 564210, and 564216 in this assay.

### Compound 1008854

[0396] For example, as provided in Example 13 (hereinbelow), Compound 1008854 demonstrated a functional observational battery (FOB) score of 1.00 in wild-type mice whereas each of Comparator Compounds Nos: 564122, 564127, 564133, 564143, 564150, 564188, 564210, and 564216 demonstrated a FOB score of 7.00. Therefore, Compound 1008854 is demonstrably more tolerable than each of Comparator Compounds Nos: 564122, 564127, 564133, 564143, 564150, 564188, 564210, and 564216 in this assay.

### Compound 1008862

[0397] For example, as provided in Example 13 (hereinbelow), Compound 1008862 demonstrated a functional observational battery (FOB) score of 2.50 in wild-type mice whereas each of Comparator Compounds Nos: 564122, 564127, 564133, 564143, 564150, 564188, 564210, and 564216 demonstrated a FOB score of 7.00. Therefore, Compound 1008862 is demonstrably more tolerable than each of Comparator Compounds Nos: 564122, 564127, 564133, 564143, 564150, 564188, 564210, and 564216 in this assay.

### Compound 1008870

[0398] For example, as provided in Example 13 (hereinbelow), Compound 1008870 demonstrated a functional observational battery (FOB) score of 1.00 in wild-type mice whereas each of Comparator Compounds Nos: 564122, 564127, 564133, 564143, 564150, 564188, 564210, and 564216 demonstrated a FOB score of 7.00. Therefore, Compound 1008870 is demonstrably more tolerable than each of Comparator Compounds Nos: 564122, 564127, 564133, 564143, 564150, 564188, 564210, and 564216 in this assay.

### Compound 1008874

[0399] For example, as provided in Example 13 (hereinbelow), Compound 1008874 demonstrated a functional observational battery (FOB) score of 1.25 in wild-type mice whereas each of Comparator Compounds Nos: 564122, 564127, 564133, 564143, 564150, 564188, 564210, and 564216 demonstrated a FOB score of 7.00. Therefore, Compound 1008874 is demonstrably more tolerable than each of Comparator Compounds Nos: 564122, 564127, 564133, 564143, 564150, 564188, 564210, and 564216 in this assay.

### Compound 1008910

[0400] For example, as provided in Example 13 (hereinbelow), Compound 1008910 demonstrated a functional observational battery (FOB) score of 0.00 in wild-type mice whereas each of Comparator Compounds Nos: 564122, 564127, 564133, 564143, 564150, 564188, 564210, and 564216 demonstrated a FOB score of 7.00. Therefore, Compound 1008910 is demonstrably more tolerable than each of Comparator Compounds Nos: 564122, 564127, 564133, 564143, 564150, 564188, 564210, and 564216 in this assay.

### IX. Certain Hotspot Regions

### 1. Nucleobases 2.455-2.483 of SEQ ID NO: 1

[0401] In certain embodiments, nucleobases 2,455-2,483 of SEQ ID NO: 1 comprise a hotspot region. In certain embodiments, modified oligonucleotides are complementary to nucleobases 2,455-2,483 of SEQ ID NO: 1. In certain embodiments, modified oligonucleotides are 20 nucleobases in length. In certain embodiments, modified oligonucleotides are gapmers. In certain embodiments, the gapmers are 5-10-5 MOE gapmers. In certain embodiments, the internucleoside linkages of the modified oligonucleotides are phosphodiester (“o”) and phosphorothioate (“s”) internucleoside linkages. In certain embodiments, the phosphodiester (“o”) and phosphorothioate (“s”) internucleoside linkages are arranged in order from 5′ to 3′: soooossssssssssooss.

[0402] The nucleobase sequences of SEQ ID Nos: 286, 287, 1113, 1188, 1260, 1336, 1412, 2391, 2468, and 3002 are complementary to nucleobases 2,455-2,483 of SEQ ID NO: 1.

[0403] In certain embodiments, modified oligonucleotides complementary to nucleobases 2,455-2,483 of SEQ ID NO: 1 achieve at least 67% reduction of ATXN2 RNA in vitro in the standard cell assay.

### 2. Nucleobases 4.393-4.424 of SEQ ID NO: 1

[0404] In certain embodiments, nucleobases 4,393-4,424 of SEQ ID NO: 1 comprise a hotspot region. In certain embodiments, modified oligonucleotides are complementary to nucleobases 4,393-4,424 of SEQ ID NO: 1. In certain embodiments, modified oligonucleotides are 20 nucleobases in length. In certain embodiments, modified oligonucleotides are gapmers. In certain embodiments, the gapmers are 5-10-5 MOE gapmers. In certain embodiments, the internucleoside linkages of the modified oligonucleotides are phosphodiester (“o”) and phosphorothioate (“s”) internucleoside linkages. In certain embodiments, the phosphodiester (“o”) and phosphorothioate (“s”) internucleoside linkages are arranged in order from 5′ to 3′: soooossssssssssooss.

[0405] The nucleobase sequences of SEQ ID Nos: 1945, 2020, 2316, 2392, 2469, 2546, 2623, 2697, 2926, 3003, 3080, and 3157 are complementary to nucleobases 4,393-4,424 of SEQ ID NO: 1.

[0406] In certain embodiments, modified oligonucleotides complementary to nucleobases 4,393-4,424 of SEQ ID NO: 1 achieve at least 64% reduction of ATXN2 RNA in vitro in the standard cell assay.

### 3. Nucleobases 4.413-4.437 of SEQ ID NO: 1

[0407] In certain embodiments, nucleobases 4,413-4,437 of SEQ ID NO: 1 comprise a hotspot region. In certain embodiments, modified oligonucleotides are complementary to nucleobases 4,413-4,437 of SEQ ID NO: 1. In certain embodiments, modified oligonucleotides are 20 nucleobases in length. In certain embodiments, modified oligonucleotides are gapmers. In certain embodiments, the gapmers are 5-10-5 MOE gapmers. In certain embodiments, the internucleoside linkages of the modified oligonucleotides are phosphodiester (“o”) and phosphorothioate (“s”) internucleoside linkages. In certain embodiments, the phosphodiester (“o”) and phosphorothioate (“s”) internucleoside linkages are arranged in order from 5′ to 3′: soooossssssssssooss.

[0408] The nucleobase sequences of SEQ ID Nos: 2247, 2317, 2393, 2470, 2927, and 3004 are complementary to nucleobases 4,413-4,437 of SEQ ID NO: 1.

[0409] In certain embodiments, modified oligonucleotides complementary to nucleobases 4,413-4,437 of SEQ ID NO: 1 achieve at least 68% reduction of ATXN2 RNA in vitro in the standard cell assay.

### 4. Nucleobases 4.525-4.554 of SEQ ID NO: 2

[0410] In certain embodiments, nucleobases 4,525-4,554 of SEQ ID NO: 2 comprise a hotspot region. In certain embodiments, modified oligonucleotides are complementary to nucleobases 4,525-4,554 of SEQ ID NO: 2. In certain embodiments, modified oligonucleotides are 20 nucleobases in length. In certain embodiments, modified oligonucleotides are gapmers. In certain embodiments, the gapmers are 5-10-5 MOE gapmers. In certain embodiments, the internucleoside linkages of the modified oligonucleotides are phosphodiester (“o”) and phosphorothioate (“s”) internucleoside linkages. In certain embodiments, the phosphodiester (“o”) and phosphorothioate (“s”) internucleoside linkages are arranged in order from 5′ to 3′: soooossssssssssooss.

[0411] The nucleobase sequences of SEQ ID Nos: 1948, 2319, 2549, 2625, 2701, 2777, 2853, 2929, 3006, 3083, and 3160 are complementary to nucleobases 4,525-4,554 of SEQ ID NO: 2.

[0412] In certain embodiments, modified oligonucleotides complementary to nucleobases 4,525-4,554 of SEQ ID NO: 2 achieve at least 79% reduction of ATXN2 RNA in vitro in the standard cell assay.

### 5. Nucleobases 4.748-4.771 of SEQ ID NO: 2

[0413] In certain embodiments, nucleobases 4,748-4,771 of SEQ ID NO: 2 comprise a hotspot region. In certain embodiments, modified oligonucleotides are complementary to nucleobases 4,748-4,771 of SEQ ID NO: 2. In certain embodiments, modified oligonucleotides are 20 nucleobases in length. In certain embodiments, modified oligonucleotides are gapmers. In certain embodiments, the gapmers are 5-10-5 MOE gapmers. In certain embodiments, the internucleoside linkages of the modified oligonucleotides are phosphodiester (“o”) and phosphorothioate (“s”) internucleoside linkages. In certain embodiments, the phosphodiester (“o”) and phosphorothioate (“s”) internucleoside linkages are arranged in order from 5′ to 3′: soooossssssssssooss.

[0414] The nucleobase sequences of SEQ ID Nos: 2175, 2626, 2702, 2778, and 3161 are complementary to nucleobases 4,748-4,771 of SEQ ID NO: 2.

[0415] In certain embodiments, modified oligonucleotides complementary to nucleobases 4,748-4,771 of SEQ ID NO: 2 achieve at least 70% reduction of ATXN2 RNA in vitro in the standard cell assay.

### 6. Nucleobases 9.927-9.954 of SEQ ID NO: 2

[0416] In certain embodiments, nucleobases 9,927-9,954 of SEQ ID NO: 2 comprise a hotspot region. In certain embodiments, modified oligonucleotides are complementary to nucleobases 9,927-9,954 of SEQ ID NO: 2. In certain embodiments, modified oligonucleotides are 20 nucleobases in length. In certain embodiments, modified oligonucleotides are gapmers. In certain embodiments, the gapmers are 5-10-5 MOE gapmers. In certain embodiments, the internucleoside linkages of the modified oligonucleotides are phosphodiester (“o”) and phosphorothioate (“s”) internucleoside linkages. In certain embodiments, the phosphodiester (“o”) and phosphorothioate (“s”) internucleoside linkages are arranged in order from 5′ to 3′: soooossssssssssooss.

[0417] The nucleobase sequences of SEQ ID Nos: 2177, 2399, 2476, 2553, 2629, 2705, 3010, 3087, and 3164 are complementary to nucleobases 9,927-9,954 of SEQ ID NO: 2.

[0418] In certain embodiments, modified oligonucleotides complementary to nucleobases 9,927-9,954 of SEQ ID NO: 2 achieve at least 62% reduction of ATXN2 RNA in vitro in the standard cell assay.

### 7. Nucleobases 10.345-10.368 of SEQ ID NO: 2

[0419] In certain embodiments, nucleobases 10,345-10,368 of SEQ ID NO: 2 comprise a hotspot region. In certain embodiments, modified oligonucleotides are complementary to nucleobases 10,345-10,368 of SEQ ID NO: 2. In certain embodiments, modified oligonucleotides are 20 nucleobases in length. In certain embodiments, modified oligonucleotides are gapmers. In certain embodiments, the gapmers are 5-10-5 MOE gapmers. In certain embodiments, the internucleoside linkages of the modified oligonucleotides are phosphodiester (“o”) and phosphorothioate (“s”) internucleoside linkages. In certain embodiments, the phosphodiester (“o”) and phosphorothioate (“s”) internucleoside linkages are arranged in order from 5′ to 3′: soooossssssssssooss.

[0420] The nucleobase sequences of SEQ ID Nos: 2323, 2400, 2477, 2933, and 3011 are complementary to nucleobases 10,345-10,368 of SEQ ID NO: 2.

[0421] In certain embodiments, modified oligonucleotides complementary to nucleobases 10,345-10,368 of SEQ ID NO: 2 achieve at least 87% reduction of ATXN2 RNA in vitro in the standard cell assay.

### 8. Nucleobases 17.153-17.182 of SEQ ID NO: 2

[0422] In certain embodiments, nucleobases 17,153-17,182 of SEQ ID NO: 2 comprise a hotspot region. In certain embodiments, modified oligonucleotides are complementary to nucleobases 17,153-17,182 of SEQ ID NO: 2. In certain embodiments, modified oligonucleotides are 20 nucleobases in length. In certain embodiments, modified oligonucleotides are gapmers. In certain embodiments, the gapmers are 5-10-5 MOE gapmers. In certain embodiments, the internucleoside linkages of the modified oligonucleotides are phosphodiester (“o”) and phosphorothioate (“s”) internucleoside linkages. In certain embodiments, the phosphodiester (“o”) and phosphorothioate (“s”) internucleoside linkages are arranged in order from 5′ to 3′: soooossssssssssooss.

[0423] The nucleobase sequences of SEQ ID Nos: 973, 2479, 2556, 2632, 2708, 2784, 2860, 2936, 3013, 3090, and 3167 are complementary to nucleobases 17,153-17,182 of SEQ ID NO: 2.

[0424] In certain embodiments, modified oligonucleotides complementary to nucleobases 17,153-17,182 of SEQ ID NO: 2 achieve at least 68% reduction of ATXN2 RNA in vitro in the standard cell assay.

### 9. Nucleobases 18.680-18.702 of SEQ ID NO: 2

[0425] In certain embodiments, nucleobases 18,680-18,702 of SEQ ID NO: 2 comprise a hotspot region. In certain embodiments, modified oligonucleotides are complementary to nucleobases 18,680-18,702 of SEQ ID NO: 2. In certain embodiments, modified oligonucleotides are 20 nucleobases in length. In certain embodiments, modified oligonucleotides are gapmers. In certain embodiments, the gapmers are 5-10-5 MOE gapmers. In certain embodiments, the internucleoside linkages of the modified oligonucleotides are phosphodiester (“o”) and phosphorothioate (“s”) internucleoside linkages. In certain embodiments, the phosphodiester (“o”) and phosphorothioate (“s”) internucleoside linkages are arranged in order from 5′ to 3′: soooossssssssssooss.

[0426] The nucleobase sequences of SEQ ID Nos: 2256, 2557, 3014, and 3091 are complementary to nucleobases 18,680-18,702 of SEQ ID NO: 2.

[0427] In certain embodiments, modified oligonucleotides complementary to nucleobases 18,680-18,702 of SEQ ID NO: 2 achieve at least 65% reduction of ATXN2 RNA in vitro in the standard cell assay.

### 10. Nucleobases 23.251-23.276 of SEQ ID NO: 2

[0428] In certain embodiments, nucleobases 23,251-23,276 of SEQ ID NO: 2 comprise a hotspot region. In certain embodiments, modified oligonucleotides are complementary to nucleobases 23,251-23,276 of SEQ ID NO: 2. In certain embodiments, modified oligonucleotides are 20 nucleobases in length. In certain embodiments, modified oligonucleotides are gapmers. In certain embodiments, the gapmers are 5-10-5 MOE gapmers. In certain embodiments, the internucleoside linkages of the modified oligonucleotides are phosphodiester (“o”) and phosphorothioate (“s”) internucleoside linkages. In certain embodiments, the phosphodiester (“o”) and phosphorothioate (“s”) internucleoside linkages are arranged in order from 5′ to 3′: soooossssssssssooss.

[0429] The nucleobase sequences of SEQ ID Nos: 1805, 2635, 2711, 2787, 2863, 2939, and 3170 are complementary to nucleobases 23,251-23,276 of SEQ ID NO: 2.

[0430] In certain embodiments, modified oligonucleotides complementary to nucleobases 23,251-23,276 of SEQ ID NO: 2 achieve at least 64% reduction of ATXN2 RNA in vitro in the standard cell assay.

### 11. Nucleobases 28.081-28.105 of SEQ ID NO: 2

[0431] In certain embodiments, nucleobases 28,081-28,105 of SEQ ID NO: 2 comprise a hotspot region. In certain embodiments, modified oligonucleotides are complementary to nucleobases 28,081-28,105 of SEQ ID NO: 2. In certain embodiments, modified oligonucleotides are 20 nucleobases in length. In certain embodiments, modified oligonucleotides are gapmers. In certain embodiments, the gapmers are 5-10-5 MOE gapmers. In certain embodiments, the internucleoside linkages of the modified oligonucleotides are phosphodiester (“o”) and phosphorothioate (“s”) internucleoside linkages. In certain embodiments, the phosphodiester (“o”) and phosphorothioate (“s”) internucleoside linkages are arranged in order from 5′ to 3′: soooossssssssssooss.

[0432] The nucleobase sequences of SEQ ID Nos: 2259, 2331, 2713, 2789, 2865, and 2941 are complementary to nucleobases 28,081-28,105 of SEQ ID NO: 2.

[0433] In certain embodiments, modified oligonucleotides complementary to nucleobases 28,081-28,105 of SEQ ID NO: 2 achieve at least 62% reduction of ATXN2 RNA in vitro in the standard cell assay.

### 12. Nucleobases 28.491-28.526 of SEQ ID NO: 2

[0434] In certain embodiments, nucleobases 28,491-28,526 of SEQ ID NO: 2 comprise a hotspot region. In certain embodiments, modified oligonucleotides are complementary to nucleobases 28,491-28,526 of SEQ ID NO: 2. In certain embodiments, modified oligonucleotides are 20 nucleobases in length. In certain embodiments, modified oligonucleotides are gapmers. In certain embodiments, the gapmers are 5-10-5 MOE gapmers. In certain embodiments, the internucleoside linkages of the modified oligonucleotides are phosphodiester (“o”) and phosphorothioate (“s”) internucleoside linkages. In certain embodiments, the phosphodiester (“o”) and phosphorothioate (“s”) internucleoside linkages are arranged in order from 5′ to 3′: soooossssssssssooss.

[0435] The nucleobase sequences of SEQ ID Nos: 669, 746, 2562, 2638, 2714, 2790, 2866, 3019, 3096, and 3173 are complementary to nucleobases 28,491-28,526 of SEQ ID NO: 2.

[0436] In certain embodiments, modified oligonucleotides complementary to nucleobases 28,491-28,526 of SEQ ID NO: 2 achieve at least 67% reduction of ATXN2 RNA in vitro in the standard cell assay.

### 13. Nucleobases 28.885-28.912 of SEQ ID NO: 2

[0437] In certain embodiments, nucleobases 28,885-28,912 of SEQ ID NO: 2 comprise a hotspot region. In certain embodiments, modified oligonucleotides are complementary to nucleobases 28,885-28,912 of SEQ ID NO: 2. In certain embodiments, modified oligonucleotides are 20 nucleobases in length. In certain embodiments, modified oligonucleotides are gapmers. In certain embodiments, the gapmers are 5-10-5 MOE gapmers. In certain embodiments, the internucleoside linkages of the modified oligonucleotides are phosphodiester (“o”) and phosphorothioate (“s”) internucleoside linkages. In certain embodiments, the phosphodiester (“o”) and phosphorothioate (“s”) internucleoside linkages are arranged in order from 5′ to 3′: soooossssssssssooss.

[0438] The nucleobase sequences of SEQ ID Nos: 977, 2486, 2563, 2639, 2715, 2791, 3020, 3097, and 3174 are complementary to nucleobases 28,885-28,912 of SEQ ID NO: 2.

[0439] In certain embodiments, modified oligonucleotides complementary to nucleobases 28,885-28,912 of SEQ ID NO: 2 achieve at least 75% reduction of ATXN2 RNA in vitro in the standard cell assay.

### 14. Nucleobases 32.328-32.352 of SEQ ID NO: 2

[0440] In certain embodiments, nucleobases 32,328-32,352 of SEQ ID NO: 2 comprise a hotspot region. In certain embodiments, modified oligonucleotides are complementary to nucleobases 32,328-32,352 of SEQ ID NO: 2. In certain embodiments, modified oligonucleotides are 20 nucleobases in length. In certain embodiments, modified oligonucleotides are gapmers. In certain embodiments, the gapmers are 5-10-5 MOE gapmers. In certain embodiments, the internucleoside linkages of the modified oligonucleotides are phosphodiester (“o”) and phosphorothioate (“s”) internucleoside linkages. In certain embodiments, the phosphodiester (“o”) and phosphorothioate (“s”) internucleoside linkages are arranged in order from 5′ to 3′: soooossssssssssooss.

[0441] The nucleobase sequences of SEQ ID Nos: 2109, 2334, 2411, 2488, 2565, and 3022 are complementary to nucleobases 32,328-32,352 of SEQ ID NO: 2.

[0442] In certain embodiments, modified oligonucleotides complementary to nucleobases 32,328-32,352 of SEQ ID NO: 2 achieve at least 66% reduction of ATXN2 RNA in vitro in the standard cell assay.

### 15. Nucleobases 32.796-32.824 of SEQ ID NO: 2

[0443] In certain embodiments, nucleobases 32,796-32,824 of SEQ ID NO: 2 comprise a hotspot region. In certain embodiments, modified oligonucleotides are complementary to nucleobases 32,796-32,824 of SEQ ID NO: 2. In certain embodiments, modified oligonucleotides are 20 nucleobases in length. In certain embodiments, modified oligonucleotides are gapmers. In certain embodiments, the gapmers are 5-10-5 MOE gapmers. In certain embodiments, the internucleoside linkages of the modified oligonucleotides are phosphodiester (“o”) and phosphorothioate (“s”) internucleoside linkages. In certain embodiments, the phosphodiester (“o”) and phosphorothioate (“s”) internucleoside linkages are arranged in order from 5′ to 3′: soooossssssssssooss.

[0444] The nucleobase sequences of SEQ ID Nos: 902, 2335, 2412, 2489, 2566, 2869, 2945, 3023, 3100, and 3177 are complementary to nucleobases 32,796-32,824 of SEQ ID NO: 2.

[0445] In certain embodiments, modified oligonucleotides complementary to nucleobases 32,796-32,824 of SEQ ID NO: 2 achieve at least 72% reduction of ATXN2 RNA in vitro in the standard cell assay.

### 16. Nucleobases 32.809-32.838 of SEQ ID NO: 2

[0446] In certain embodiments, nucleobases 32,809-32,838 of SEQ ID NO: 2 comprise a hotspot region. In certain embodiments, modified oligonucleotides are complementary to nucleobases 32,809-32,838 of SEQ ID NO: 2. In certain embodiments, modified oligonucleotides are 20 nucleobases in length. In certain embodiments, modified oligonucleotides are gapmers. In certain embodiments, the gapmers are 5-10-5 MOE gapmers. In certain embodiments, the internucleoside linkages of the modified oligonucleotides are phosphodiester (“o”) and phosphorothioate (“s”) internucleoside linkages. In certain embodiments, the phosphodiester (“o”) and phosphorothioate (“s”) internucleoside linkages are arranged in order from 5′ to 3′: soooossssssssssooss.

[0447] The nucleobase sequences of SEQ ID Nos: 979, 2336, 2413, 2490, 2567, 2643, 2870, 2946, 3024, 3101, and 3178 are complementary to nucleobases 32,809-32,838 of SEQ ID NO: 2.

[0448] In certain embodiments, modified oligonucleotides complementary to nucleobases 32,809-32,838 of SEQ ID NO: 2 achieve at least 60% reduction of ATXN2 RNA in vitro in the standard cell assay.

### 17. Nucleobases 36.308-36.334 of SEQ ID NO: 2

[0449] In certain embodiments, nucleobases 36,308-36,334 of SEQ ID NO: 2 comprise a hotspot region. In certain embodiments, modified oligonucleotides are complementary to nucleobases 36,308-36,334 of SEQ ID NO: 2. In certain embodiments, modified oligonucleotides are 20 nucleobases in length. In certain embodiments, modified oligonucleotides are gapmers. In certain embodiments, the gapmers are 5-10-5 MOE gapmers. In certain embodiments, the internucleoside linkages of the modified oligonucleotides are phosphodiester (“o”) and phosphorothioate (“s”) internucleoside linkages. In certain embodiments, the phosphodiester (“o”) and phosphorothioate (“s”) internucleoside linkages are arranged in order from 5′ to 3′: soooossssssssssooss.

[0450] The nucleobase sequences of SEQ ID Nos: 1280, 2338, 2415, 2644, 2720, 2796, 2872, and 2948 are complementary to nucleobases 36,308-36,334 of SEQ ID NO: 2.

[0451] In certain embodiments, modified oligonucleotides complementary to nucleobases 36,308-36,334 of SEQ ID NO: 2 achieve at least 69% reduction of ATXN2 RNA in vitro in the standard cell assay.

### 18. Nucleobases 36.845-36.872 of SEQ ID NO: 2

[0452] In certain embodiments, nucleobases 36,845-36,872 of SEQ ID NO: 2 comprise a hotspot region. In certain embodiments, modified oligonucleotides are complementary to nucleobases 36,845-36,872 of SEQ ID NO: 2. In certain embodiments, modified oligonucleotides are 20 nucleobases in length. In certain embodiments, modified oligonucleotides are gapmers. In certain embodiments, the gapmers are 5-10-5 MOE gapmers. In certain embodiments, the internucleoside linkages of the modified oligoiucleotides are phosphodiester (“o”) and phosphorothioate (“s”) internucleoside linkages. In certain embodiments, the phosphodiester (“o”) and phosphorothioate (“s”) internucleoside linkages are arranged in order from 5′ to 3′: soooossssssssssooss.

[0453] The nucleobase sequences of SEQ ID Nos: 2035, 2339, 2645, 2721, 2797, 2873, 2949, 3103, and 3180 are complementary to nucleobases 36,845-36,872 of SEQ ID NO: 2.

[0454] In certain embodiments, modified oligonucleotides complementary to nucleobases 36,845-36,872 of SEQ ID NO: 2 achieve at least 63% reduction of ATXN2 RNA in vitro in the standard cell assay.

### 19. Nucleobases 49.147-49.173 of SEQ ID NO: 2

[0455] In certain embodiments, nucleobases 49,147-49,173 of SEQ ID NO: 2 comprise a hotspot region. In certain embodiments, modified oligonucleotides are complementary to nucleobases 49,147-49,173 of SEQ ID NO: 2. In certain embodiments, modified oligonucleotides are 20 nucleobases in length. In certain embodiments, modified oligonucleotides are gapmers. In certain embodiments, the gapmers are 5-10-5 MOE gapmers. In certain embodiments, the internucleoside linkages of the modified oligoiucleotides are phosphodiester (“o”) and phosphorothioate (“s”) internucleoside linkages. In certain embodiments, the phosphodiester (“o”) and phosphorothioate (“s”) internucleoside linkages are arranged in order from 5′ to 3′: soooossssssssssooss.

[0456] The nucleobase sequences of SEQ ID Nos: 1439, 2575, 2651, 2727, 2803, 3032, 3109, and 3186 are complementary to nucleobases 49,147-49,173 of SEQ ID NO: 2.

[0457] In certain embodiments, modified oligonucleotides complementary to nucleobases 49,147-49,173 of SEQ ID NO: 2 achieve at least 69% reduction of ATXN2 RNA in vitro in the standard cell assay.

### 20. Nucleobases 57.469-57.494 of SEQ ID NO: 2

[0458] In certain embodiments, nucleobases 57,469-57,494 of SEQ ID NO: 2 comprise a hotspot region. In certain embodiments, modified oligonucleotides are complementary to nucleobases 57,469-57,494 of SEQ ID NO: 2. In certain embodiments, modified oligonucleotides are 20 nucleobases in length. In certain embodiments, modified oligonucleotides are gapmers. In certain embodiments, the gapmers are 5-10-5 MOE gapmers. In certain embodiments, the internucleoside linkages of the modified oligionucleotides are phosphodiester (“o”) and phosphorothioate (“s”) internucleoside linkages. In certain embodiments, the phosphodiester (“o”) and phosphorothioate (“s”) internucleoside linkages are arranged in order from 5′ to 3′: soooossssssssssooss.

[0459] The nucleobase sequences of SEQ ID Nos: 2045, 2121, 2426, 2503, 2580, 3037, and 3114 are complementary to nucleobases 57,469-57,494 of SEQ ID NO: 2.

[0460] In certain embodiments, modified oligonucleotides complementary to nucleobases 57,469-57,494 of SEQ ID NO: 2 achieve at least 49% reduction of ATXN2 RNA in vitro in the standard cell assay.

### 21. Nucleobases 82.848-82.874 of SEQ ID NO: 2

[0461] In certain embodiments, nucleobases 82,848-82,874 of SEQ ID NO: 2 comprise a hotspot region. In certain embodiments, modified oligonucleotides are complementary to nucleobases 82,848-82,874 of SEQ ID NO: 2. In certain embodiments, modified oligonucleotides are 20 nucleobases in length. In certain embodiments, modified oligonucleotides are gapmers. In certain embodiments, the gapmers are 5-10-5 MOE gapmers. In certain embodiments, the internucleoside linkages of the modified oligonucleotides are phosphodiester (“o”) and phosphorothioate (“s”) internucleoside linkages. In certain embodiments, the phosphodiester (“o”) and phosphorothioate (“s”) internucleoside linkages are arranged in order from 5′ to 3′: soooossssssssssooss.

[0462] The nucleobase sequences of SEQ ID Nos: 1982, 2359, 2436, 2513, 2590, 2969, 3047, and 3124 are complementary to nucleobases 82,848-82,874 of SEQ ID NO: 2.

[0463] In certain embodiments, modified oligonucleotides complementary to nucleobases 82,848-82,874 of SEQ ID NO: 2 achieve at least 57% reduction of ATXN2 RNA in vitro in the standard cell assay.

### 22. Nucleobases 83.784-83.813 of SEQ ID NO: 2

[0464] In certain embodiments, nucleobases 83,784-83,813 of SEQ ID NO: 2 comprise a hotspot region. In certain embodiments, modified oligonucleotides are complementary to nucleobases 83,784-83,813 of SEQ ID NO: 2. In certain embodiments, modified oligonucleotides are 20 nucleobases in length. In certain embodiments, modified oligonucleotides are gapmers. In certain embodiments, the gapmers are 5-10-5 MOE gapmers. In certain embodiments, the internucleoside linkages of the modified oligonucleotides are phosphodiester (“o”) and phosphorothioate (“s”) internucleoside linkages. In certain embodiments, the phosphodiester (“o”) and phosphorothioate (“s”) internucleoside linkages are arranged in order from 5′ to 3′: soooossssssssssooss.

[0465] The nucleobase sequences of SEQ ID Nos: 849, 2361, 2438, 2515, 2592, 2668, 2744, 2971, 3049, 3126, and 3203 are complementary to nucleobases 83,784-83,813 of SEQ ID NO: 2.

[0466] In certain embodiments, modified oligonucleotides complementary to nucleobases 83,784-83,813 of SEQ ID NO: 2 achieve at least 76% reduction of ATXN2 RNA in vitro in the standard cell assay.

### 23. Nucleobases 84.743-84.782 of SEQ ID NO: 2

[0467] In certain embodiments, nucleobases 84,743-84,782 of SEQ ID NO: 2 comprise a hotspot region. In certain embodiments, modified oligonucleotides are complementary to nucleobases 84,743-84,782 of SEQ ID NO: 2. In certain embodiments, modified oligonucleotides are 20 nucleobases in length. In certain embodiments, modified oligonucleotides are gapmers. In certain embodiments, the gapmers are 5-10-5 MOE gapmers. In certain embodiments, the internucleoside linkages of the modified oligonucleotides are phosphodiester (“o”) and phosphorothioate (“s”) internucleoside linkages. In certain embodiments, the phosphodiester (“o”) and phosphorothioate (“s”) internucleoside linkages are arranged in order from 5′ to 3′: soooossssssssssooss.

[0468] The nucleobase sequences of SEQ ID Nos: 2210, 2441, 2518, 2595, 2671, 2747, 2823, 2899, 2975, 3052, 3129, and 3206 are complementary to nucleobases 84,743-84,782 of SEQ ID NO: 2.

[0469] In certain embodiments, modified oligonucleotides complementary to nucleobases 84,743-84,782 of SEQ ID NO: 2 achieve at least 58% reduction of ATXN2 RNA in vitro in the standard cell assay.

### 24. Nucleobases 84.813-84.839 of SEQ ID NO: 2

[0470] In certain embodiments, nucleobases 84,813-84,839 of SEQ ID NO: 2 comprise a hotspot region. In certain embodiments, modified oligonucleotides are complementary to nucleobases 84,813-84,839 of SEQ ID NO: 2. In certain embodiments, modified oligonucleotides are 20 nucleobases in length. In certain embodiments, modified oligonucleotides are gapmers. In certain embodiments, the gapmers are 5-10-5 MOE gapmers. In certain embodiments, the internucleoside linkages of the modified oligonucleotides are phosphodiester (“o”) and phosphorothioate (“s”) internucleoside linkages. In certain embodiments, the phosphodiester (“o”) and phosphorothioate (“s”) internucleoside linkages are arranged in order from 5′ to 3′: soooossssssssssooss.

[0471] The nucleobase sequences of SEQ ID Nos: 542, 2286, 2672, 2748, 2824, 2900, 3130, and 3207 are complementary to nucleobases 84,813-84,839 of SEQ ID NO: 2.

[0472] In certain embodiments, modified oligonucleotides complementary to nucleobases 84,813-84,839 of SEQ ID NO: 2 achieve at least 69% reduction of ATXN2 RNA in vitro in the standard cell assay.

### 25. Nucleobases 85.051-85.076 of SEQ ID NO: 2

[0473] In certain embodiments, nucleobases 85,051-85,076 of SEQ ID NO: 2 comprise a hotspot region. In certain embodiments, modified oligonucleotides are complementary to nucleobases 85,051-85,076 of SEQ ID NO: 2. In certain embodiments, modified oligonucleotides are 20 nucleobases in length. In certain embodiments, modified oligonucleotides are gapmers. In certain embodiments, the gapmers are 5-10-5 MOE gapmers. In certain embodiments, the internucleoside linkages of the modified oligonucleotides are phosphodiester (“o”) and phosphorothioate (“s”) internucleoside linkages. In certain embodiments, the phosphodiester (“o”) and phosphorothioate (“s”) internucleoside linkages are arranged in order from 5′ to 3′: soooossssssssssooss.

[0474] The nucleobase sequences of SEQ ID Nos: 773, 850, 2673, 2749, 2825, 3131, and 3208 are complementary to nucleobases 85,051-85,076 of SEQ ID NO: 2.

[0475] In certain embodiments, modified oligonucleotides complementary to nucleobases 85,051-85,076 of SEQ ID NO: 2 achieve at least 57% reduction of ATXN2 RNA in vitro in the standard cell assay.

### 26. Nucleobases 97.618-97.643 of SEQ ID NO: 2

[0476] In certain embodiments, nucleobases 97,618-97,643 of SEQ ID NO: 2 comprise a hotspot region. In certain embodiments, modified oligonucleotides are complementary to nucleobases 97,618-97,643 of SEQ ID NO: 2. In certain embodiments, modified oligonucleotides are 20 nucleobases in length. In certain embodiments, modified oligonucleotides are gapmers. In certain embodiments, the gapmers are 5-10-5 MOE gapmers. In certain embodiments, the internucleoside linkages of the modified oligonucleotides are phosphodiester (“o”) and phosphorothioate (“s”) internucleoside linkages. In certain embodiments, the phosphodiester (“o”) and phosphorothioate (“s”) internucleoside linkages are arranged in order from 5′ to 3′: soooossssssssssooss.

[0477] The nucleobase sequences of SEQ ID Nos: 1839, 2370, 2447, 2524, 2904, 2980, and 3058 are complementary to nucleobases 97,618-97,643 of SEQ ID NO: 2.

[0478] In certain embodiments, modified oligonucleotides complementary to nucleobases 97,618-97,643 of SEQ ID NO: 2 achieve at least 72% reduction of ATXN2 RNA in vitro in the standard cell assay.

### 27. Nucleobases 119.023-119.048 of SEQ ID NO: 2

[0479] In certain embodiments, nucleobases 119,023-119,048 of SEQ ID NO: 2 comprise a hotspot region. In certain embodiments, modified oligonucleotides are complementary to nucleobases 119,023-119,048 of SEQ ID NO: 2. In certain embodiments, modified oligonucleotides are 20 nucleobases in length. In certain embodiments, modified oligonucleotides are gapmers. In certain embodiments, the gapmers are 5-10-5 MOE gapmers. In certain embodiments, the internucleoside linkages of the modified oligonucleotides are phosphodiester (“o”) and phosphorothioate (“s”) internucleoside linkages. In certain embodiments, the phosphodiester (“o”) and phosphorothioate (“s”) internucleoside linkages are arranged in order from 5′ to 3′: soooossssssssssooss.

[0480] The nucleobase sequences of SEQ ID Nos: 2072, 2606, 2682, 2758, 2834, 3140, and 3217 are complementary to nucleobases 119,023-119,048 of SEQ ID NO: 2.

[0481] In certain embodiments, modified oligonucleotides complementary to nucleobases 119,023-119,048 of SEQ ID NO: 2 achieve at least 69% reduction of ATXN2 RNA in vitro in the standard cell assay.

### 28. Nucleobases 132.161-132.195 of SEQ ID NO: 2

[0482] In certain embodiments, nucleobases 132,161-132,195 of SEQ ID NO: 2 comprise a hotspot region. In certain embodiments, modified oligonucleotides are complementary to nucleobases 132,161-132,195 of SEQ ID NO: 2. In certain embodiments, modified oligonucleotides are 20 nucleobases in length. In certain embodiments, modified oligonucleotides are gapmers. In certain embodiments, the gapmers are 5-10-5 MOE gapmers. In certain embodiments, the internucleoside linkages of the modified oligonucleotides are phosphodiester (“o”) and phosphorothioate (“s”) internucleoside linkages. In certain embodiments, the phosphodiester (“o”) and phosphorothioate (“s”) internucleoside linkages are arranged in order from 5′ to 3′: soooossssssssssooss.

[0483] The nucleobase sequences of SEQ ID Nos: 1927, 2002, 2381, 2458, 2763, 2839, 2915, and 2991 are complementary to nucleobases 132,161-132,195 of SEQ ID NO: 2.

[0484] In certain embodiments, modified oligonucleotides complementary to nucleobases 132,161-132,195 of SEQ ID NO: 2 achieve at least 78% reduction of ATXN2 RNA in vitro in the standard cell assay.

### 29. Nucleobases 139.271-139.303 of SEQ ID NO: 2

[0485] In certain embodiments, nucleobases 139,271-139,303 of SEQ ID NO: 2 comprise a hotspot region. In certain embodiments, modified oligonucleotides are complementary to nucleobases 139,271-139,303 of SEQ ID NO: 2. In certain embodiments, modified oligonucleotides are 20 nucleobases in length. In certain embodiments, modified oligonucleotides are gapmers. In certain embodiments, the gapmers are 5-10-5 MOE gapmers. In certain embodiments, the internucleoside linkages of the modified oligonucleotides are phosphodiester (“o”) and phosphorothioate (“s”) internucleoside linkages. In certain embodiments, the phosphodiester (“o”) and phosphorothioate (“s”) internucleoside linkages are arranged in order from 5′ to 3′: soooossssssssssooss.

[0486] The nucleobase sequences of SEQ ID Nos: 795, 872, 2540, 2617, 3074, and 3151 are complementary to nucleobases 139,271-139,303 of SEQ ID NO: 2.

[0487] In certain embodiments, modified oligonucleotides complementary to nucleobases 139,271-139,303 of SEQ ID NO: 2 achieve at least 61% reduction of ATXN2 RNA in vitro in the standard cell assay.

### 30. Nucleobases 1.075-1.146 of SEQ ID NO: 1

[0488] In certain embodiments, nucleobases 1,075-1,146 of SEQ ID NO: 1 comprise a hotspot region. In certain embodiments, modified oligonucleotides are complementary to nucleobases 1,075-1,146 of SEQ ID NO: 1. In certain embodiments, modified oligonucleotides are 20 nucleobases in length. In certain embodiments, modified oligonucleotides are gapmers. In certain embodiments, the gapmers are 5-10-5 MOE gapmers. In certain embodiments, the gapmers are 6-10-4 MOE gapmers. In certain embodiments, the internucleoside linkages of the modified oligonucleotides are phosphodiester (“o”) and phosphorothioate (“s”) internucleoside linkages. In certain embodiments, the phosphodiester (“o”) and phosphorothioate (“s”) internucleoside linkages are arranged in order from 5′ to 3′: soooossssssssssooss. In certain embodiments, the phosphodiester (“o”) and phosphorothioate (“s”) internucleoside linkages are arranged in order from 5′ to 3′: In certain embodiments, the phosphodiester (“o”) and phosphorothioate (“s”) internucleoside linkages are arranged in order from 5′ to 3′: soooossssssssssooss.

[0489] The nucleobase sequences of SEQ ID Nos: 33, 1485, 1561, 1637, 1714, 1788, 1861, 1936, 2013, 2088, 2164, 2467, 2544, 3001, 3232, 3233, 3234, 3235, 3237, 3238, 3239, 3298, 3299, 3300, and 3301 are complementary to nucleobases 1,075-1,146 of SEQ ID NO: 1.

[0490] In certain embodiments, modified oligonucleotides complementary to nucleobases 1,075-1,146 of SEQ ID NO: 1 achieve at least 49% reduction of ATXN2 mRNA in vitro in the standard cell assay.

### Nonlimiting Disclosure and Incorporation by Reference

[0491] Each of the literature and patent publications listed herein is incorporated by reference in its entirety.

[0492] While certain compounds, compositions and methods described herein have been described with specificity in accordance with certain embodiments, the following examples serve only to illustrate the compounds described herein and are not intended to limit the same. Each of the references, GenBank accession numbers, and the like recited in the present application is incorporated herein by reference in its entirety.

[0493] Although the sequence listing accompanying this filing identifies each sequence as either “RNA” or “DNA” as required, in reality, those sequences may be modified with any combination of chemical modifications. One of skill in the art will readily appreciate that such designation as “RNA” or “DNA” to describe modified oligonucleotides is, in certain instances, arbitrary. For example, an oligonucleotide comprising a nucleoside comprising a 2′-OH sugar moiety and a thymine base could be described as a DNA having a modified sugar (2′-OH in place of one 2′-H of DNA) or as an RNA having a modified base (thymine (methylated uracil) in place of a uracil of RNA). Accordingly, nucleic acid sequences provided herein, including, but not limited to those in the sequence listing, are intended to encompass nucleic acids containing any combination of natural or modified RNA and/or DNA, including, but not limited to such nucleic acids having modified nucleobases. By way of further example and without limitation, an oligomeric compound having the nucleobase sequence “ATCGATCG” encompasses any oligomeric compounds having such nucleobase sequence, whether modified or unmodified, including, but not limited to, such compounds comprising RNA bases, such as those having sequence “AUCGAUCG” and those having some DNA bases and some RNA bases such as “AUCGATCG” and oligomeric compounds having other modified nucleobases, such as “AT^{m}CGAUCG,” wherein ^{m}C indicates a cytosine base comprising a methyl group at the 5-position.

[0494] Certain compounds described herein (e.g., modified oligonucleotides) have one or more asymmetric center and thus give rise to enantiomers, diastereomers, and other stereoisomeric configurations that may be defined, in terms of absolute stereochemistry, as (R) or (S), as α or β such as for sugar anomers, or as (D) or (L), such as for amino acids, etc. Compounds provided herein that are drawn or described as having certain stereoisomeric configurations include only the indicated compounds. Compounds provided herein that are drawn or described with undefined stereochemistry include all such possible isomers, including their stereorandom and optically pure forms, unless specified otherwise. Likewise, tautomeric forms of the compounds herein are also included unless otherwise indicated. Unless otherwise indicated, compounds described herein are intended to include corresponding salt forms.

[0495] The compounds described herein include variations in which one or more atoms are replaced with a non-radioactive isotope or radioactive isotope of the indicated element. For example, compounds herein that comprise hydrogen atoms encompass all possible deuterium substitutions for each of the ¹H hydrogen atoms. Isotopic substitutions encompassed by the compounds herein include but are not limited to: ²H or ³H in place of ¹H, ¹³C or ¹⁴C in place of ¹²C, ¹³N in place of ¹⁴N, ¹⁷O or ¹⁸O in place of ¹⁶O, and ³³S, ³⁴S, ³⁵S, or ³⁶S in place of ³²S. In certain embodiments, non-radioactive isotopic substitutions may impart new properties on the oligomeric compound that are beneficial for use as a therapeutic or research tool. In certain embodiments, radioactive isotopic substitutions may make the compound suitable for research or diagnostic purposes such as imaging.

### EXAMPLES

[0496] The following examples illustrate certain embodiments of the present disclosure and are not limiting. Moreover, where specific embodiments are provided, the inventors have contemplated generic application of those specific embodiments. For example, disclosure of an oligonucleotide having a particular motif provides reasonable support for additional oligonucleotides having the same or similar motif. And, for example, where a particular high-affinity modification appears at a particular position, other high-affinity modifications at the same position are considered suitable, unless otherwise indicated.

### Example 1: Effect of 5-10-5 MOE Gapmers with Mixed Internucleoside Linkages on Human ATXN2 RNA in Vitro, Single Dose

[0497] Modified oligonucleotides complementary to a human ATXN2 nucleic acid were designed and tested for their effect on ATXN2 RNA in SCA2-04 cells. SCA2-04 is a patient fibroblast cell line with 34 CAG repeats. The modified oligonucleotides were tested in a series of experiments that had similar culture conditions.

[0498] Cultured SCA2-04 cells at a density of 20,000 cells per well were transfected using electroporation with 2,000 or 7,000 nM concentration of modified oligonucleotide, as indicated in the tables below, or no modified oligonucleotide for untreated controls. After approximately 24 hours, RNA was isolated from the cells and ATXN2 RNA levels were measured by quantitative real-time PCR. Human primer probe set hAtaxin_LTSO1321 (forward sequence ATATGGACTCCAGTTATGCAAAAAGA, designated herein as SEQ ID NO: 10; reverse sequence TCGCCATTCACTITAGCACTGA, designated herein as SEQ ID NO: 11; probe sequence ATGCTITTACTGACTCTGC, designated herein as SEQ ID: 12) was used to measure RNA levels. ATXN2 RNA levels were adjusted according to total RNA content, as measured by RIBOGREEN®. Results are presented in the tables below as percent ATXN2 RNA levels relative to untreated control cells.

[0499] The modified oligonucleotides marked with an asterisk (*) target the amplicon region of the primer probe set. Additional assays may be used to measure the potency and efficacy of oligonucleotides targeting the amplicon region.

[0500] The modified oligonucleotides in the tables below are 5-10-5 MOE gapmers. The gapmers are 20 nucleobases in length, wherein the central gap segment comprises ten 2′-deoxynucleosides and is flanked by wing segments on both the 5′ end and on the 3′ end comprising five 2′-MOE nucleosides. The sugar motif for the gapmers is (from 5′ to 3′): eeeeeddddddddddeeeee; wherein ‘d’ represents a 2′-deoxyribose sugar and ‘e’ represents a 2′-MOE modified sugar. The internucleoside linkages are mixed phosphodiester and phosphorothioate internucleoside linkages. The internucleoside linkage motif for the gapmers is (from 5′ to 3′): soooossssssssssooss; wherein ‘o’ represents a phosphodiester internucleoside linkage and ‘s’ represents a phosphorothioate internucleoside linkage. Each cytosine residue is a 5-methyl cytosine. “Start Site” indicates the 5′-most nucleoside to which the gapmer is complementary in the human nucleic acid sequence. “Stop Site” indicates the 3′-most nucleoside to which the gapmer is complementary in the human nucleic acid sequence.

[0501] Each modified oligonucleotide listed in the Tables below is complementary to human ATXN2 nucleic acid sequences SEQ ID NO: 1 or SEQ ID NO: 2, as indicated. ‘N/A’ indicates that the modified oligonucleotide is not complementary to that particular nucleic acid with 100% complementarity. As shown below, modified oligonucleotides complementary to the nucleobase sequence of human ATXN2 reduced the amount of human ATXN2 RNA.

TABLE 1
Percent control of human ATXN2 RNA with 5-10-5 MOE gapmers
with mixed internucleoside linkages at 7,000 nM concentration

| | | SEQ ID | SEQ ID | SEQ ID | | | |
|---|---|---|---|---|---|---|---|
| | SEQ ID | NO: 1 | NO: 2 | NO: 2 | | | SEQ |
| Compound | NO: 1 | Stop | Start | Stop | | ATXN2 | ID |
| Number | Start Site | Site | Site | Site | Sequence (5′ to 3′) | % Control | NO |
| 708134 | 929 | 948 | N/A | N/A | GATTCCATCAAAAGAAATCG | 16 | 30 |
| 708155 | 1094 | 1113 | 49268 | 49287 | CGAACTGGATTCTGTACTTT | 14 | 31 |
| 708199 | 1477 | 1496 | 81637 | 81656 | GCTAACTGGTTTGCCCTTGC | 10 | 32 |
| 755233 | 1123 | 1142 | 49297 | 49316 | CTCTCCATTATTTCTTCACG | 7 | 33 |
| 756933 | 717 | 736 | 2707 | 2726 | CGGGCGGCGGCTGCTGCTGC | 20 | 34 |
| 756934 | 723 | 742 | 2713 | 2732 | CAGCCGCGGGCGGCGGCTGC | 89 | 35 |
| 756935 | 729 | 748 | 2719 | 2738 | CATTGGCAGCCGCGGGCGGC | 33 | 36 |
| 756936 | 735 | 754 | 2725 | 2744 | TGCGGACATTGGCAGCCGCG | 51 | 37 |
| 756937 | 741 | 760 | 2731 | 2750 | CGGGCTTGCGGACATTGGCA | 15 | 38 |
| 756938 | 747 | 766 | 2737 | 2756 | TGCCGCCGGGCTTGCGGACA | 27 | 39 |
| 756939 | 759 | 778 | 2749 | 2768 | CTAGAAGGCCGCTGCCGCCG | 50 | 40 |
| 756940 | 778 | 797 | 2768 | 2787 | GGCGCGGCGGCGGGCGACGC | 13 | 41 |
| 756941 | 784 | 803 | 2774 | 2793 | GGCGAAGGCGCGGCGGCGGG | 49 | 42 |
| 756942 | 790 | 809 | 2780 | 2799 | GAGGACGGCGAAGGCGCGGC | 16 | 43 |
| 756943 | 796 | 815 | 2786 | 2805 | GAGGACGAGGACGGCGAAGG | 25 | 44 |
| 756944 | 802 | 821 | 2792 | 2811 | GAGACCGAGGACGAGGACGG | 34 | 45 |
| 756945 | 808 | 827 | 2798 | 2817 | GACGAGGAGACCGAGGACGA | 19 | 46 |
| 756946 | 814 | 833 | 2804 | 2823 | GCCGAGGACGAGGAGACCGA | 13 | 47 |
| 756947 | 820 | 839 | 2810 | 2829 | GCCGTGGCCGAGGACGAGGA | 23 | 48 |
| 756948 | 826 | 845 | 2816 | 2835 | GAGGGAGCCGTGGCCGAGGA | 36 | 49 |
| 756949 | 832 | 851 | 2822 | 2841 | ACCGAGGAGGGAGCCGTGGC | 47 | 50 |
| 756950 | 838 | 857 | 2828 | 2847 | GCGACCACCGAGGAGGGAGC | 51 | 51 |
| 756951 | 844 | 863 | 2834 | 2853 | GTCGCCGCGACCACCGAGGA | 20 | 52 |
| 756952 | 850 | 869 | 2840 | 2859 | CCGGAGGTCGCCGCGACCAC | 25 | 53 |
| 756953 | 856 | 875 | 2846 | 2865 | CCGCCGCCGGAGGTCGCCGC | 15 | 54 |
| 756954 | 862 | 881 | 2852 | 2871 | GGCCTCCCGCCGCCGGAGGT | 61 | 55 |
| 756955 | 868 | 887 | 2858 | 2877 | AGGCCGGGCCTCCCGCCGCC | 33 | 56 |
| 756956 | 874 | 893 | 2864 | 2883 | CTGCCCAGGCCGGGCCTCCC | 34 | 57 |
| 756957 | 880 | 899 | N/A | N/A | CGACCTCTGCCCAGGCCGGG | 31 | 58 |
| 756958 | 886 | 905 | N/A | N/A | CTGTTTCGACCTCTGCCCAG | 28 | 59 |
| 756959 | 892 | 911 | 45746 | 45765 | TTGTTACTGTTTCGACCTCT | 6 | 60 |
| 756960 | 898 | 917 | 45752 | 45771 | AGTCCTTTGTTACTGTTTCG | 9 | 61 |
| 756961 | 904 | 923 | 45758 | 45777 | TGAGGCAGTCCTTTGTTACT | 14 | 62 |
| 756962 | 910 | 929 | 45764 | 45783 | GTAGACTGAGGCAGTCCTTT | 17 | 63 |
| 756963 | 930 | 949 | 47449 | 47468 | AGATTCCATCAAAAGAAATC | 16 | 64 |
| 756964 | 932 | 951 | 47451 | 47470 | ATAGATTCCATCAAAAGAAA | 19 | 65 |
| 756965 | 934 | 953 | 47453 | 47472 | GCATAGATTCCATCAAAAGA | 22 | 66 |
| 756966 | 935 | 954 | 47454 | 47473 | TGCATAGATTCCATCAAAAG | 18 | 67 |
| 756967 | 936 | 955 | 47455 | 47474 | TTGCATAGATTCCATCAAAA | 21 | 68 |
| 756968 | 938 | 957 | 47457 | 47476 | ATTTGCATAGATTCCATCAA | 23 | 69 |
| 756969 | 940 | 959 | 47459 | 47478 | ATATTTGCATAGATTCCATC | 13 | 70 |
| 756970 | 941 | 960 | 47460 | 47479 | CATATTTGCATAGATTCCAT | 13 | 71 |
| 756971 | 947 | 966 | 47466 | 47485 | CATCCTCATATTTGCATAGA | 31 | 72 |
| 756972 | 953 | 972 | 47472 | 47491 | ATGAACCATCCTCATATTTG | 15 | 73 |
| 756973 | 959 | 978 | 47478 | 47497 | AAGTATATGAACCATCCTCA | 17 | 74 |
| 756974 | 965 | 984 | 47484 | 47503 | TGATGTAAGTATATGAACCA | 33 | 75 |
| 756975 | 971 | 990 | 47490 | 47509 | AACAACTGATGTAAGTATAT | 16 | 76 |
| 756976 | 979 | 998 | N/A | N/A | TTGGAGCCAACAACTGATGT | 28 | 77 |
| 756977 | 986 | 1005 | N/A | N/A | TTCACATTTGGAGCCAACAA | 17 | 78 |
| 756978 | 992 | 1011 | 48691 | 48710 | TTGTACTTCACATTTGGAGC | 8 | 79 |
| 756979 | 998 | 1017 | 48697 | 48716 | TTTCACTTGTACTTCACATT | 20 | 80 |
| 756980 | 1004 | 1023 | 48703 | 48722 | TCCATTTTTCACTTGTACTT | 9 | 81 |
| 756981 | 1010 | 1029 | 48709 | 48728 | TATACCTCCATTTTTCACTT | 11 | 82 |
| 756982 | 1016 | 1035 | 48715 | 48734 | TTCATATATACCTCCATTTT | 33 | 83 |
| 756983 | 1022 | 1041 | 48721 | 48740 | AACTCCTTCATATATACCTC | 11 | 84 |
| 756984 | 1028 | 1047 | 48727 | 48746 | TTTAAAAACTCCTTCATATA | 39 | 85 |
| 756985 | 1034 | 1053 | 48733 | 48752 | GTAAGTTTTAAAAACTCCTT | 8 | 86 |
| 756986 | 1040 | 1059 | 48739 | 48758 | CGGACTGTAAGTTTTAAAAA | 12 | 87 |
| 756987 | 1046 | 1065 | N/A | N/A | ACACTTCGGACTGTAAGTTT | 14 | 88 |
| 756988 | 1052 | 1071 | N/A | N/A | CAAATCACACTTCGGACTGT | 18 | 89 |
| 756989 | 1058 | 1077 | N/A | N/A | AAGTACCAAATCACACTTCG | 9 | 90 |
| 756990 | 1064 | 1083 | 49238 | 49257 | GGCATCAAGTACCAAATCAC | 20 | 91 |
| 756991 | 1070 | 1089 | 49244 | 49263 | ATGTGCGGCATCAAGTACCA | 9 | 92 |
| 756992 | 1076 | 1095 | 49250 | 49269 | TTTCTCATGTGCGGCATCAA | 19 | 93 |
| 756993 | 1082 | 1101 | 49256 | 49275 | TGTACTTTTCTCATGTGCGG | 5 | 94 |
| 756994 | 1088 | 1107 | 49262 | 49281 | GGATTCTGTACTTTTCTCAT | 37 | 95 |
| 756995 | 1100 | 1119 | 49274 | 49293 | CGGCCCCGAACTGGATTCTG | 17 | 96 |
| 756996 | 1124 | 1143 | 49298 | 49317 | ACTCTCCATTATTTCTTCAC | 7 | 97 |
| 756997 | 1126 | 1145 | 49300 | 49319 | ATACTCTCCATTATTTCTTC | 4 | 98 |
| 756998 | 1128 | 1147 | 49302 | 49321 | AAATACTCTCCATTATTTCT | 13 | 99 |
| 756999 | 1129 | 1148 | 49303 | 49322 | AAAATACTCTCCATTATTTC | 34 | 100 |
| 757000 | 1135 | 1154 | 49309 | 49328 | TTGAACAAAATACTCTCCAT | 9 | 101 |
| 757001 | 1141 | 1160 | 49315 | 49334 | GAACATTTGAACAAAATACT | 38 | 102 |
| 757002 | 1147 | 1166 | 49321 | 49340 | AAGTCTGAACATTTGAACAA | 12 | 103 |
| 757003 | 1153 | 1172 | 49327 | 49346 | ACAACAAAGTCTGAACATTT | 24 | 104 |
| 757004 | 1159 | 1178 | 49333 | 49352 | TGTACCACAACAAAGTCTGA | 30 | 105 |
| 757005* | 1171 | 1190 | 49345 | 49364 | ATATCTTTAAACTGTACCAC | 7 | 106 |
| 757006* | 1177 | 1196 | 49351 | 49370 | GAGTCCATATCTTTAAACTG | 17 | 107 |

TABLE 2
Percent control of human ATXN2 RNA with 5-10-5 MOE gapmers
with mixed internucleoside linkages at 2,000 nM concentration

| | SEQ ID | SEQ ID | SEQ ID | SEQ ID | | | |
|---|---|---|---|---|---|---|---|
| | NO: 1 | NO: 1 | NO: 2 | NO: 2 | | | SEQ |
| Compound | Start | Stop | Start | Stop | | ATXN2 % | ID |
| Number | Site | Site | Site | Site | Sequence (5′ to 3′) | control | NO |
| 708199 | 1477 | 1496 | 81637 | 81656 | GCTAACTGGTTTGCCCTTGC | 1 | 32 |
| 708200 | 1478 | 1497 | 81638 | 81657 | TGCTAACTGGTTTGCCCTTG | 14 | 108 |
| 708201 | 1480 | 1499 | 81640 | 81659 | TCTGCTAACTGGTTTGCCCT | 7 | 109 |
| 708203 | 1482 | 1501 | 81642 | 81661 | CTTCTGCTAACTGGTTTGCC | 6 | 110 |
| 755237 | 1562 | 1581 | 81722 | 81741 | TGCTGTGTATTTTTCTTCCT | 4 | 111 |
| 755240 | 1693 | 1712 | 83304 | 83323 | CCCATACGCGGTGAATTCTG | 24 | 112 |
| 757007* | 1183 | 1202 | 49357 | 49376 | TAACTGGAGTCCATATCTTT | 11 | 113 |
| 757008* | 1189 | 1208 | 49363 | 49382 | TTTGCATAACTGGAGTCCAT | 1 | 114 |
| 757009* | 1195 | 1214 | N/A | N/A | TCTCTTTTTGCATAACTGGA | 0 | 115 |
| 757010* | 1201 | 1220 | N/A | N/A | AAAGCATCTCTTTTTGCATA | 10 | 116 |
| 757011* | 1207 | 1226 | N/A | N/A | TCAGTAAAAGCATCTCTTTT | 16 | 117 |
| 757012* | 1213 | 1232 | 76350 | 76369 | GCAGAGTCAGTAAAAGCATC | 3 | 118 |
| 757013* | 1219 | 1238 | 76356 | 76375 | CTGATAGCAGAGTCAGTAAA | 10 | 119 |
| 757014* | 1225 | 1244 | 76362 | 76381 | TTAGCACTGATAGCAGAGTC | 0 | 120 |
| 757015* | 1231 | 1250 | 76368 | 76387 | TTCACTTTAGCACTGATAGC | 3 | 121 |
| 757016* | 1237 | 1256 | 76374 | 76393 | TCGCCATTCACTTTAGCACT | 0 | 122 |
| 757017 | 1258 | 1277 | 76395 | 76414 | TCCAGGTCCTTCTCTTTGTG | 45 | 123 |
| 757018 | 1264 | 1283 | 76401 | 76420 | CAGGGCTCCAGGTCCTTCTC | 17 | 124 |
| 757019 | 1270 | 1289 | 76407 | 76426 | GCATCCCAGGGCTCCAGGTC | 24 | 125 |
| 757020 | 1276 | 1295 | 76413 | 76432 | TCACCTGCATCCCAGGGCTC | 9 | 126 |
| 757021 | 1282 | 1301 | 76419 | 76438 | GTGAGTTCACCTGCATCCCA | 6 | 127 |
| 757022 | 1288 | 1307 | 76425 | 76444 | TTGGCTGTGAGTTCACCTGC | 9 | 128 |
| 757023 | 1294 | 1313 | 76431 | 76450 | TCCTCATTGGCTGTGAGTTC | 14 | 129 |
| 757024 | 1300 | 1319 | 76437 | 76456 | TCAAGTTCCTCATTGGCTGT | 17 | 130 |
| 757025 | 1312 | 1331 | 76449 | 76468 | TTTTCCAAAGCCTCAAGTTC | 65 | 131 |
| 757026 | 1335 | 1354 | N/A | N/A | GATCCCATCCATTAGATACG | 8 | 132 |
| 757027 | 1350 | 1369 | 80705 | 80724 | GAAACATATCATTGGGATCC | 13 | 133 |
| 757028 | 1356 | 1375 | 80711 | 80730 | TATATCGAAACATATCATTG | 6 | 134 |
| 757029 | 1362 | 1381 | 80717 | 80736 | CTTCATTATATCGAAACATA | 22 | 135 |
| 757030 | 1368 | 1387 | 80723 | 80742 | AATTTTCTTCATTATATCGA | 56 | 136 |
| 757031 | 1374 | 1393 | 80729 | 80748 | CACCATAATTTTCTTCATTA | 14 | 137 |
| 757032 | 1380 | 1399 | 80735 | 80754 | ACACTACACCATAATTTTCT | 20 | 138 |
| 757033 | 1412 | 1431 | N/A | N/A | TGTATACGAAGATAAACTGC | 21 | 139 |
| 757034 | 1430 | 1449 | N/A | N/A | ATCTCTTTCTAAGGGCACTG | 5 | 140 |
| 757035 | 1442 | 1461 | 81602 | 81621 | TTCTTCTGAGTTATCTCTTT | 18 | 141 |
| 757036 | 1448 | 1467 | 81608 | 81627 | TAAAAATTCTTCTGAGTTAT | 80 | 142 |
| 757037 | 1454 | 1473 | 81614 | 81633 | CCGTTTTAAAAATTCTTCTG | 5 | 143 |
| 757038 | 1460 | 1479 | 81620 | 81639 | TGCTTCCCGTTTTAAAAATT | 23 | 144 |
| 757039 | 1466 | 1485 | 81626 | 81645 | TGCCCTTGCTTCCCGTTTTA | 25 | 145 |
| 757040 | 1472 | 1491 | 81632 | 81651 | CTGGTTTGCCCTTGCTTCCC | 6 | 146 |
| 757041 | 1474 | 1493 | 81634 | 81653 | AACTGGTTTGCCCTTGCTTC | 16 | 147 |
| 757042 | 1476 | 1495 | 81636 | 81655 | CTAACTGGTTTGCCCTTGCT | 16 | 148 |
| 757043 | 1484 | 1503 | 81644 | 81663 | TTCTTCTGCTAACTGGTTTG | 21 | 149 |
| 757044 | 1490 | 1509 | 81650 | 81669 | CTCAATTTCTTCTGCTAACT | 35 | 150 |
| 757045 | 1496 | 1515 | 81656 | 81675 | ACTTGACTCAATTTCTTCTG | 4 | 151 |
| 757046 | 1502 | 1521 | 81662 | 81681 | CTGGGCACTTGACTCAATTT | 14 | 152 |
| 757047 | 1508 | 1527 | 81668 | 81687 | TTTGTACTGGGCACTTGACT | 21 | 153 |
| 757048 | 1514 | 1533 | 81674 | 81693 | TCGAGCTTTGTACTGGGCAC | 10 | 154 |
| 757049 | 1520 | 1539 | 81680 | 81699 | GGCCACTCGAGCTTTGTACT | 13 | 155 |
| 757050 | 1526 | 1545 | 81686 | 81705 | TTCCAGGGCCACTCGAGCTT | 8 | 156 |
| 757051 | 1532 | 1551 | 81692 | 81711 | ATCATTTTCCAGGGCCACTC | 14 | 157 |
| 757052 | 1538 | 1557 | 81698 | 81717 | CCTATCATCATTTTCCAGGG | 2 | 158 |
| 757053 | 1544 | 1563 | 81704 | 81723 | CTCACTCCTATCATCATTTT | 13 | 159 |
| 757054 | 1550 | 1569 | 81710 | 81729 | TTCTTCCTCACTCCTATCAT | 61 | 160 |
| 757055 | 1556 | 1575 | 81716 | 81735 | GTATTTTTCTTCCTCACTCC | 2 | 161 |
| 757056 | 1568 | 1587 | 81728 | 81747 | CTGAACTGCTGTGTATTTTT | 13 | 162 |
| 757057 | 1574 | 1593 | 81734 | 81753 | ATTTCTCTGAACTGCTGTGT | 2 | 163 |
| 757058 | 1580 | 1599 | 81740 | 81759 | ACTGGAATTTCTCTGAACTG | 10 | 164 |
| 757059 | 1603 | 1622 | 81763 | 81782 | TTTATGCTGTGCCCCTCACG | 42 | 165 |
| 757060 | 1609 | 1628 | 81769 | 81788 | CTAGTGTTTATGCTGTGCCC | 10 | 166 |
| 757061 | 1615 | 1634 | N/A | N/A | TTTTCCCTAGTGTTTATGCT | 39 | 167 |
| 757062 | 1621 | 1640 | N/A | N/A | TATTTATTTTCCCTAGTGTT | 33 | 168 |
| 757063 | 1633 | 1652 | 83244 | 83263 | CCAGGAGGAATATATTTATT | 16 | 169 |
| 757064 | 1639 | 1658 | 83250 | 83269 | CTTTGTCCAGGAGGAATATA | 19 | 170 |
| 757065 | 1645 | 1664 | 83256 | 83275 | CTATTTCTTTGTCCAGGAGG | 7 | 171 |
| 757066 | 1651 | 1670 | 83262 | 83281 | ACTTCTCTATTTCTTTGTCC | 0 | 172 |
| 757067 | 1657 | 1676 | 83268 | 83287 | GATATGACTTCTCTATTTCT | 13 | 173 |
| 757068 | 1663 | 1682 | 83274 | 83293 | CCCCAGGATATGACTTCTCT | 16 | 174 |
| 757069 | 1669 | 1688 | 83280 | 83299 | CCACTTCCCCAGGATATGAC | 31 | 175 |
| 757070 | 1675 | 1694 | 83286 | 83305 | TGTCTCCCACTTCCCCAGGA | 10 | 176 |
| 757071 | 1681 | 1700 | 83292 | 83311 | GAATTCTGTCTCCCACTTCC | 24 | 177 |
| 757072 | 1687 | 1706 | 83298 | 83317 | CGCGGTGAATTCTGTCTCCC | 3 | 178 |
| 757073 | 1688 | 1707 | 83299 | 83318 | ACGCGGTGAATTCTGTCTCC | 5 | 179 |
| 757074 | 1690 | 1709 | 83301 | 83320 | ATACGCGGTGAATTCTGTCT | 7 | 180 |
| 757075 | 1692 | 1711 | 83303 | 83322 | CCATACGCGGTGAATTCTGT | 6 | 181 |
| 757076 | 1694 | 1713 | 83305 | 83324 | GCCCATACGCGGTGAATTCT | 11 | 182 |
| 757077 | 1696 | 1715 | 83307 | 83326 | TGGCCCATACGCGGTGAATT | 15 | 183 |
| 757078 | 1698 | 1717 | 83309 | 83328 | GCTGGCCCATACGCGGTGAA | 21 | 184 |

TABLE 3
Percent control of human ATXN2 RNA with 5-10-5 MOE gapmers
with mixed internucleoside linkages at 2,000 nM concentration

| | SEQ ID | SEQ ID | SEQ ID | SEQ ID | | | |
|---|---|---|---|---|---|---|---|
| | NO: 1 | NO: 1 | NO: 2 | NO: 2 | | | SEQ |
| Compound | Start | Stop | Start | Stop | | ATXN2 % | ID |
| Number | Site | Site | Site | Site | Sequence (5′ to 3′) | control | NO |
| 708199 | 1477 | 1496 | 81637 | 81656 | GCTAACTGGTTTGCCCTTGC | 8 | 32 |
| 708237 | 1783 | 1802 | 83394 | 83413 | TTAACTACTCTTTGGTCTGA | 36 | 185 |
| 708247 | 1903 | 1922 | 85399 | 85418 | CTGGAGGGCGGCCGTGTAGG | 26 | 186 |
| 708248 | 1957 | 1976 | 85453 | 85472 | GGAGAACCATGAGCAGAGGG | 41 | 187 |
| 755234 | 1963 | 1982 | 85459 | 85478 | GGAGCTGGAGAACCATGAGC | 17 | 188 |
| 755236 | 1969 | 1988 | 85465 | 85484 | GAGACAGGAGCTGGAGAACC | 40 | 189 |
| 755239 | 2099 | 2118 | 88209 | 88228 | GTGGGATACAAATTCTAGGC | 4 | 190 |
| 757079 | 1699 | 1718 | 83310 | 83329 | GGCTGGCCCATACGCGGTGA | 11 | 191 |
| 757080 | 1705 | 1724 | 83316 | 83335 | GATCCAGGCTGGCCCATACG | 42 | 192 |
| 757081 | 1711 | 1730 | 83322 | 83341 | GAGCCCGATCCAGGCTGGCC | 53 | 193 |
| 757082 | 1717 | 1736 | 83328 | 83347 | GGCATGGAGCCCGATCCAGG | 31 | 194 |
| 757083 | 1723 | 1742 | 83334 | 83353 | CTTGATGGCATGGAGCCCGA | 64 | 195 |
| 757084 | 1729 | 1748 | 83340 | 83359 | GTGGATCTTGATGGCATGGA | 23 | 196 |
| 757085 | 1735 | 1754 | 83346 | 83365 | TGAGAAGTGGATCTTGATGG | 58 | 197 |
| 757086 | 1741 | 1760 | 83352 | 83371 | GAAGTGTGAGAAGTGGATCT | 49 | 198 |
| 757087 | 1747 | 1766 | 83358 | 83377 | AAATCTGAAGTGTGAGAAGT | 71 | 199 |
| 757088 | 1753 | 1772 | 83364 | 83383 | GGGTTGAAATCTGAAGTGTG | 24 | 200 |
| 757089 | 1765 | 1784 | 83376 | 83395 | GAACCAGAATTCGGGTTGAA | 8 | 201 |
| 757090 | 1771 | 1790 | 83382 | 83401 | TGGTCTGAACCAGAATTCGG | 31 | 202 |
| 757091 | 1777 | 1796 | 83388 | 83407 | ACTCTTTGGTCTGAACCAGA | 47 | 203 |
| 757092 | 1789 | 1808 | 83400 | 83419 | CCTCCATTAACTACTCTTTG | 19 | 204 |
| 757093 | 1795 | 1814 | N/A | N/A | GGAACACCTCCATTAACTAC | 34 | 205 |
| 757094 | 1807 | 1826 | 85303 | 85322 | GGCGATGGCCAGGGAACACC | 3 | 206 |
| 757095 | 1814 | 1833 | 85310 | 85329 | TGGGCAAGGCGATGGCCAGG | 58 | 207 |
| 757096 | 1820 | 1839 | 85316 | 85335 | AGGAGATGGGCAAGGCGATG | 60 | 208 |
| 757097 | 1826 | 1845 | 85322 | 85341 | AGAGGAAGGAGATGGGCAAG | 51 | 209 |
| 757098 | 1832 | 1851 | 85328 | 85347 | TGGGCGAGAGGAAGGAGATG | 37 | 210 |
| 757099 | 1838 | 1857 | 85334 | 85353 | AGAAGGTGGGCGAGAGGAAG | 130 | 211 |
| 757100 | 1844 | 1863 | 85340 | 85359 | GTAGCGAGAAGGTGGGCGAG | 35 | 212 |
| 757101 | 1850 | 1869 | 85346 | 85365 | TGACTGGTAGCGAGAAGGTG | 65 | 213 |
| 757102 | 1856 | 1875 | 85352 | 85371 | GGGACCTGACTGGTAGCGAG | 39 | 214 |
| 757103 | 1862 | 1881 | 85358 | 85377 | AGAGTTGGGACCTGACTGGT | 28 | 215 |
| 757104 | 1868 | 1887 | 85364 | 85383 | TGGAAGAGAGTTGGGACCTG | 10 | 216 |
| 757105 | 1874 | 1893 | 85370 | 85389 | CCGAGGTGGAAGAGAGTTGG | 153 | 217 |
| 757106 | 1880 | 1899 | 85376 | 85395 | GGCTGCCCGAGGTGGAAGAG | 12 | 218 |
| 757107 | 1927 | 1946 | 85423 | 85442 | GGTCTGGATGGCCGCGAGGG | 20 | 219 |
| 757108 | 1958 | 1977 | 85454 | 85473 | TGGAGAACCATGAGCAGAGG | 26 | 220 |
| 757109 | 1960 | 1979 | 85456 | 85475 | GCTGGAGAACCATGAGCAGA | 24 | 221 |
| 757110 | 1962 | 1981 | 85458 | 85477 | GAGCTGGAGAACCATGAGCA | 34 | 222 |
| 757111 | 1964 | 1983 | 85460 | 85479 | AGGAGCTGGAGAACCATGAG | 26 | 223 |
| 757112 | 1966 | 1985 | 85462 | 85481 | ACAGGAGCTGGAGAACCATG | 26 | 224 |
| 757113 | 1968 | 1987 | 85464 | 85483 | AGACAGGAGCTGGAGAACCA | 12 | 225 |
| 757114 | 1975 | 1994 | 85471 | 85490 | ATAGTAGAGACAGGAGCTGG | 42 | 226 |
| 757115 | 1981 | 2000 | 85477 | 85496 | TTAGGCATAGTAGAGACAGG | 66 | 227 |
| 757116 | 2002 | 2021 | N/A | N/A | GGCCCTTCTGAAGACATGCG | 9 | 228 |
| 757117 | 2008 | 2027 | N/A | N/A | CTTGGAGGCCCTTCTGAAGA | 105 | 229 |
| 757118 | 2014 | 2033 | N/A | N/A | GACATCCTTGGAGGCCCTTC | 29 | 230 |
| 757119 | 2035 | 2054 | 88145 | 88164 | GGATGTCGCTGGGCCTTTGG | 48 | 231 |
| 757120 | 2041 | 2060 | 88151 | 88170 | TTTCGAGGATGTCGCTGGGC | 28 | 232 |
| 757121 | 2047 | 2066 | 88157 | 88176 | CTGTGATTTCGAGGATGTCG | 40 | 233 |
| 757122 | 2053 | 2072 | 88163 | 88182 | GAAACTCTGTGATTTCGAGG | 28 | 234 |
| 757123 | 2059 | 2078 | 88169 | 88188 | CCAGCAGAAACTCTGTGATT | 49 | 235 |
| 757124 | 2065 | 2084 | 88175 | 88194 | CCCCTCCCAGCAGAAACTCT | 20 | 236 |
| 757125 | 2071 | 2090 | 88181 | 88200 | ATGGAACCCCTCCCAGCAGA | 31 | 237 |
| 757126 | 2077 | 2096 | 88187 | 88206 | CTGGATATGGAACCCCTCCC | 26 | 238 |
| 757127 | 2083 | 2102 | 88193 | 88212 | AGGCCACTGGATATGGAACC | 5 | 239 |
| 757128 | 2089 | 2108 | 88199 | 88218 | AATTCTAGGCCACTGGATAT | 38 | 240 |
| 757129 | 2094 | 2113 | 88204 | 88223 | ATACAAATTCTAGGCCACTG | 9 | 241 |
| 757130 | 2096 | 2115 | 88206 | 88225 | GGATACAAATTCTAGGCCAC | 5 | 242 |
| 757131 | 2098 | 2117 | 88208 | 88227 | TGGGATACAAATTCTAGGCC | 4 | 243 |
| 757132 | 2100 | 2119 | 88210 | 88229 | TGTGGGATACAAATTCTAGG | 31 | 244 |
| 757133 | 2102 | 2121 | 88212 | 88231 | GTTGTGGGATACAAATTCTA | 39 | 245 |
| 757134 | 2122 | 2141 | 88232 | 88251 | GTAGCTGCTTCACTGGGTGG | 53 | 246 |
| 757135 | 2128 | 2147 | 88238 | 88257 | GGAGGAGTAGCTGCTTCACT | 15 | 247 |
| 757136 | 2134 | 2153 | 88244 | 88263 | GCTACTGGAGGAGTAGCTGC | 50 | 248 |
| 757137 | 2140 | 2159 | 88250 | 88269 | GTCCTTGCTACTGGAGGAGT | 35 | 249 |
| 757138 | 2146 | 2165 | 88256 | 88275 | GGACTGGTCCTTGCTACTGG | 18 | 250 |
| 757139 | 2152 | 2171 | 88262 | 88281 | CCCGAGGGACTGGTCCTTGC | 18 | 251 |
| 757140 | 2158 | 2177 | 88268 | 88287 | GTTCCCCCCGAGGGACTGGT | 33 | 252 |
| 757141 | 2177 | 2196 | 88287 | 88306 | ACTGACCACTGATGACCACG | 34 | 253 |
| 757142 | 2183 | 2202 | N/A | N/A | AACCCCACTGACCACTGATG | 85 | 254 |
| 757143 | 2189 | 2208 | N/A | N/A | TCTTGGAACCCCACTGACCA | 62 | 255 |
| 757144 | 2195 | 2214 | N/A | N/A | GGATAATCTTGGAACCCCAC | 51 | 256 |
| 757145 | 2215 | 2234 | 91099 | 91118 | CTGGGTCTATGAGTTTTAGG | 28 | 257 |
| 757146 | 2221 | 2240 | 91105 | 91124 | GGAGACCTGGGTCTATGAGT | 17 | 258 |
| 757147 | 2231 | 2250 | 91115 | 91134 | GTTCTGTCTGGGAGACCTGG | 13 | 259 |
| 757148 | 2237 | 2256 | 91121 | 91140 | AATACTGTTCTGTCTGGGAG | 25 | 260 |
| 757149 | 2243 | 2262 | 91127 | 91146 | ATTTCCAATACTGTTCTGTC | 18 | 261 |

TABLE 4
Percent control of human ATXN2 RNA with 5-10-5 MOE gapmers
with mixed internucleoside linkages at 2,000 nM concentration

| | SEQ ID | SEQ ID | SEQ ID | SEQ ID | | | |
|---|---|---|---|---|---|---|---|
| | NO: 1 | NO: 1 | NO: 2 | NO: 2 | | | SEQ |
| Compound | Start | Stop | Start | Stop | | ATXN2 % | ID |
| Number | Site | Site | Site | Site | Sequence (5′ to 3′) | control | NO |
| 708199 | 1477 | 1496 | 81637 | 81656 | GCTAACTGGTTTGCCCTTGC | 26 | 32 |
| 757150 | 2266 | 2285 | 91150 | 91169 | GCAAGAACTGGCCCACTGGG | 90 | 262 |
| 757151 | 2272 | 2291 | 91156 | 91175 | GGAGAAGCAAGAACTGGCCC | 73 | 263 |
| 757152 | 2291 | 2310 | 91175 | 91194 | TGGAATAATACCAGCTTGGG | 39 | 264 |
| 757153 | 2297 | 2316 | 91181 | 91200 | TTCAGTTGGAATAATACCAG | 105 | 265 |
| 757154 | 2303 | 2322 | 91187 | 91206 | AACAGCTTCAGTTGGAATAA | 59 | 266 |
| 757155 | 2309 | 2328 | 91193 | 91212 | CATGGCAACAGCTTCAGTTG | 66 | 267 |
| 757156 | 2315 | 2334 | 91199 | 91218 | AATAGGCATGGCAACAGCTT | 44 | 268 |
| 757157 | 2321 | 2340 | 91205 | 91224 | AGCTGGAATAGGCATGGCAA | 32 | 269 |
| 757158 | 2327 | 2346 | 91211 | 91230 | AGATGCAGCTGGAATAGGCA | 129 | 270 |
| 757159 | 2333 | 2352 | 91217 | 91236 | CGTAGGAGATGCAGCTGGAA | 32 | 271 |
| 757160 | 2351 | 2370 | 91235 | 91254 | CGATGCAGGACTAGCAGGCG | 26 | 272 |
| 757161 | 2357 | 2376 | 91241 | 91260 | TCTGTTCGATGCAGGACTAG | 23 | 273 |
| 757162 | 2363 | 2382 | 91247 | 91266 | AACAGCTCTGTTCGATGCAG | 23 | 274 |
| 757163 | 2391 | 2410 | N/A | N/A | TGGAATCTTTAGCCTCACTA | 67 | 275 |
| 757164 | 2397 | 2416 | N/A | N/A | GAAGCCTGGAATCTTTAGCC | 59 | 276 |
| 757165 | 2403 | 2422 | 91673 | 91692 | GATCTTGAAGCCTGGAATCT | 67 | 277 |
| 757166 | 2409 | 2428 | 91679 | 91698 | GCCTCTGATCTTGAAGCCTG | 56 | 278 |
| 757167 | 2415 | 2434 | 91685 | 91704 | AGTTCTGCCTCTGATCTTGA | 80 | 279 |
| 757168 | 2421 | 2440 | 91691 | 91710 | CAGGAGAGTTCTGCCTCTGA | 131 | 280 |
| 757169 | 2427 | 2446 | 91697 | 91716 | TCCCTGCAGGAGAGTTCTGC | 59 | 281 |
| 757170 | 2433 | 2452 | 91703 | 91722 | CTTTATTCCCTGCAGGAGAG | 79 | 282 |
| 757171 | 2439 | 2458 | 91709 | 91728 | TATTTTCTTTATTCCCTGCA | 56 | 283 |
| 757172 | 2445 | 2464 | 91715 | 91734 | GTTTAATATTTTCTTTATTC | 89 | 284 |
| 757173 | 2451 | 2470 | 91721 | 91740 | CATTGGGTTTAATATTTTCT | 54 | 285 |
| 757174 | 2457 | 2476 | 91727 | 91746 | ATGTTTCATTGGGTTTAATA | 39 | 286 |
| 757175 | 2463 | 2482 | 91733 | 91752 | TAGGTGATGTTTCATTGGGT | 23 | 287 |
| 757176 | 2469 | 2488 | 91739 | 91758 | AGAAGCTAGGTGATGTTTCA | 81 | 288 |
| 757177 | 2475 | 2494 | 91745 | 91764 | CTTTTGAGAAGCTAGGTGAT | 90 | 289 |
| 757178 | 2481 | 2500 | 91751 | 91770 | TTTCAGCTTTTGAGAAGCTA | 61 | 290 |
| 757179 | 2487 | 2506 | 91757 | 91776 | CTTTGTTTTCAGCTTTTGAG | 35 | 291 |
| 757180 | 2493 | 2512 | N/A | N/A | ATATACCTTTGTTTTCAGCT | 31 | 292 |
| 757181 | 2499 | 2518 | N/A | N/A | CTGGTGATATACCTTTGTTT | 42 | 293 |
| 757182 | 2505 | 2524 | 92046 | 92065 | AAACAACTGGTGATATACCT | 132 | 294 |
| 757183 | 2511 | 2530 | 92052 | 92071 | GTTCAGAAACAACTGGTGAT | 39 | 295 |
| 757184 | 2517 | 2536 | 92058 | 92077 | TTCTATGTTCAGAAACAACT | 37 | 296 |
| 757185 | 2523 | 2542 | 92064 | 92083 | TCTGTTTTCTATGTTCAGAA | 58 | 297 |
| 757186 | 2529 | 2548 | 92070 | 92089 | CATCAATCTGTTTTCTATGT | 38 | 298 |
| 757187 | 2535 | 2554 | 92076 | 92095 | TTAAATCATCAATCTGTTTT | 122 | 299 |
| 757188 | 2541 | 2560 | 92082 | 92101 | ATTTCTTTAAATCATCAATC | 86 | 300 |
| 757189 | 2547 | 2566 | 92088 | 92107 | TCTTAAATTTCTTTAAATCA | 128 | 301 |
| 757190 | 2553 | 2572 | 92094 | 92113 | AATCATTCTTAAATTTCTTT | 55 | 302 |
| 757191 | 2559 | 2578 | N/A | N/A | ACCTAAAATCATTCTTAAAT | 141 | 303 |
| 757192 | 2565 | 2584 | N/A | N/A | GCTGTAACCTAAAATCATTC | 64 | 304 |
| 757193 | 2571 | 2590 | N/A | N/A | AACTTGGCTGTAACCTAAAA | 84 | 305 |
| 757194 | 2577 | 2596 | 112886 | 112905 | AAGTAGAACTTGGCTGTAAC | 59 | 306 |
| 757195 | 2583 | 2602 | 112892 | 112911 | ATTCAGAAGTAGAACTTGGC | 82 | 307 |
| 757196 | 2589 | 2608 | 112898 | 112917 | CCATAGATTCAGAAGTAGAA | 63 | 308 |
| 757197 | 2595 | 2614 | 112904 | 112923 | GTTGATCCATAGATTCAGAA | 61 | 309 |
| 757198 | 2601 | 2620 | 112910 | 112929 | TTAGTAGTTGATCCATAGAT | 50 | 310 |
| 757199 | 2607 | 2626 | 112916 | 112935 | TTTTGTTTAGTAGTTGATCC | 104 | 311 |
| 757200 | 2613 | 2632 | 112922 | 112941 | CTCTATTTTTGTTTAGTAGT | 26 | 312 |
| 757201 | 2619 | 2638 | 112928 | 112947 | CTCCCTCTCTATTTTTGTTT | 57 | 313 |
| 757202 | 2625 | 2644 | 112934 | 112953 | ATTTTTCTCCCTCTCTATTT | 115 | 314 |
| 757203 | 2631 | 2650 | 112940 | 112959 | CTCTTGATTTTTCTCCCTCT | 39 | 315 |
| 757204 | 2637 | 2656 | 112946 | 112965 | TCAAATCTCTTGATTTTTCT | 49 | 316 |
| 757205 | 2643 | 2662 | 112952 | 112971 | CTTTGATCAAATCTCTTGAT | 59 | 317 |
| 757206 | 2649 | 2668 | 112958 | 112977 | TTTTGTCTTTGATCAAATCT | 60 | 318 |
| 757207 | 2655 | 2674 | 112964 | 112983 | GTTCAATTTTGTCTTTGATC | 33 | 319 |
| 757208 | 2661 | 2680 | 112970 | 112989 | CACTTGGTTCAATTTTGTCT | 31 | 320 |
| 757209 | 2667 | 2686 | 112976 | 112995 | CCTTAGCACTTGGTTCAATT | 20 | 321 |
| 757210 | 2673 | 2692 | 112982 | 113001 | AAGAATCCTTAGCACTTGGT | 20 | 322 |
| 757211 | 2679 | 2698 | 112988 | 113007 | CAATGAAAGAATCCTTAGCA | 28 | 323 |
| 757212 | 2685 | 2704 | 112994 | 113013 | TATTTTCAATGAAAGAATCC | 83 | 324 |
| 757213 | 2691 | 2710 | 113000 | 113019 | TGCTGCTATTTTCAATGAAA | 20 | 325 |
| 757214 | 2697 | 2716 | 113006 | 113025 | AGTTGCTGCTGCTATTTTCA | 37 | 326 |
| 757215 | 2699 | 2718 | 113008 | 113027 | ACAGTTGCTGCTGCTATTTT | 50 | 327 |
| 757216 | 2701 | 2720 | 113010 | 113029 | GTACAGTTGCTGCTGCTATT | 36 | 328 |
| 757217 | 2703 | 2722 | 113012 | 113031 | TGGTACAGTTGCTGCTGCTA | 50 | 329 |
| 757218 | 2704 | 2723 | 113013 | 113032 | CTGGTACAGTTGCTGCTGCT | 17 | 330 |
| 757219 | 2705 | 2724 | 113014 | 113033 | ACTGGTACAGTTGCTGCTGC | 21 | 331 |
| 757220 | 2707 | 2726 | 113016 | 113035 | CCACTGGTACAGTTGCTGCT | 43 | 332 |
| 757221 | 2709 | 2728 | 113018 | 113037 | TGCCACTGGTACAGTTGCTG | 54 | 333 |
| 757222 | 2715 | 2734 | 113024 | 113043 | TGCTGCTGCCACTGGTACAG | 55 | 334 |
| 757223 | 2721 | 2740 | 113030 | 113049 | TCGGCTTGCTGCTGCCACTG | 37 | 335 |
| 757224 | 2727 | 2746 | 113036 | 113055 | GGCTATTCGGCTTGCTGCTG | 29 | 336 |
| 757225 | 2757 | 2776 | 113066 | 113085 | TGTTACTAAGTATTGAAGGG | 54 | 337 |
| 757226 | 2763 | 2782 | 113072 | 113091 | GCTCCGTGTTACTAAGTATT | 22 | 338 |

TABLE 5
Percent control of human ATXN2 RNA with 5-10-5 MOE gapmers
with mixed internucleoside linkages at 2,000 nM concentration

| | SEQ ID | SEQ ID | SEQ ID | SEQ ID | | | |
|---|---|---|---|---|---|---|---|
| | NO: 1 | NO: 1 | NO: 2 | NO: 2 | | | SEQ |
| Compound | Start | Stop | Start | Stop | | ATXN2 % | ID |
| Number | Site | Site | Site | Site | Sequence (5′ to 3′) | control | NO |
| 708199 | 1477 | 1496 | 81637 | 81656 | GCTAACTGGTTTGCCCTTGC | 29 | 32 |
| 757227 | 2769 | 2788 | 113078 | 113097 | TCTTGTGCTCCGTGTTACTA | 48 | 339 |
| 757228 | 2775 | 2794 | 113084 | 113103 | GTCCCCTCTTGTGCTCCGTG | 28 | 340 |
| 757229 | 2781 | 2800 | 113090 | 113109 | CCTCAGGTCCCCTCTTGTGC | 66 | 341 |
| 757230 | 2787 | 2806 | 113096 | 113115 | AAGTGACCTCAGGTCCCCTC | 116 | 342 |
| 757231 | 2793 | 2812 | 113102 | 113121 | CTTGGGAAGTGACCTCAGGT | 37 | 343 |
| 757232 | 2799 | 2818 | 113108 | 113127 | GAACCCCTTGGGAAGTGACC | 39 | 344 |
| 757233 | 2805 | 2824 | 113114 | 113133 | AAGTCTGAACCCCTTGGGAA | 47 | 345 |
| 757234 | 2811 | 2830 | 113120 | 113139 | GGCTGGAAGTCTGAACCCCT | 28 | 346 |
| 757235 | 2817 | 2836 | 113126 | 113145 | ATGCTGGGCTGGAAGTCTGA | 63 | 347 |
| 757236 | 2823 | 2842 | 113132 | 113151 | GTTTACATGCTGGGCTGGAA | 31 | 348 |
| 757237 | 2829 | 2848 | 113138 | 113157 | TCTCTTGTTTACATGCTGGG | 47 | 349 |
| 757238 | 2835 | 2854 | 113144 | 113163 | CGTCTTTCTCTTGTTTACAT | 33 | 350 |
| 757239 | 2853 | 2872 | 113162 | 113181 | CTTTCTTCTCTTCCTTATCG | 74 | 351 |
| 757240 | 2874 | 2893 | N/A | N/A | TCCTAACTTGCTCAGCTGCG | 36 | 352 |
| 757241 | 2882 | 2901 | N/A | N/A | TGTTGATTTCCTAACTTGCT | 64 | 353 |
| 757242 | 2888 | 2907 | 114848 | 114867 | ATTCAATGTTGATTTCCTAA | 52 | 354 |
| 757243 | 2897 | 2916 | 114857 | 114876 | TGCATTGGGATTCAATGTTG | 41 | 355 |
| 757244 | 2913 | 2932 | 114873 | 114892 | GTGGGTTGAACTCCTTTGCA | 89 | 356 |
| 757245 | 2932 | 2951 | N/A | N/A | TTTGGCTGAGAGAAGGAACG | 79 | 357 |
| 757246 | 2938 | 2957 | N/A | N/A | GAAGGCTTTGGCTGAGAGAA | 88 | 358 |
| 757247 | 2944 | 2963 | N/A | N/A | GTAGTAGAAGGCTTTGGCTG | 58 | 359 |
| 757248 | 2964 | 2983 | 115819 | 115838 | GAGGCCGAGGTGAAGTTGGG | 50 | 360 |
| 757249 | 2970 | 2989 | 115825 | 115844 | GTGCTTGAGGCCGAGGTGAA | 49 | 361 |
| 757250 | 2976 | 2995 | 115831 | 115850 | TAGGTTGTGCTTGAGGCCGA | 29 | 362 |
| 757251 | 2982 | 3001 | 115837 | 115856 | ATGGGCTAGGTTGTGCTTGA | 48 | 363 |
| 757252 | 2988 | 3007 | 115843 | 115862 | CCATAGATGGGCTAGGTTGT | 84 | 364 |
| 757253 | 2994 | 3013 | 115849 | 115868 | GACCCACCATAGATGGGCTA | 87 | 365 |
| 757254 | 3000 | 3019 | 115855 | 115874 | GTTGATGACCCACCATAGAT | 88 | 366 |
| 757255 | 3006 | 3025 | 115861 | 115880 | TTGGCTGTTGATGACCCACC | 91 | 367 |
| 757256 | 3012 | 3031 | 115867 | 115886 | CTGGAGTTGGCTGTTGATGA | 101 | 368 |
| 757257 | 3018 | 3037 | 115873 | 115892 | TATAAACTGGAGTTGGCTGT | 84 | 369 |
| 757258 | 3024 | 3043 | 115879 | 115898 | GCTGAGTATAAACTGGAGTT | 52 | 370 |
| 757259 | 3030 | 3049 | 115885 | 115904 | AAACAGGCTGAGTATAAACT | 114 | 371 |
| 757260 | 3036 | 3055 | 115891 | 115910 | CAAAACAAACAGGCTGAGTA | 53 | 372 |
| 757261 | 3042 | 3061 | 115897 | 115916 | TTGGTGCAAAACAAACAGGC | 75 | 373 |
| 757262 | 3048 | 3067 | 115903 | 115922 | TCATATTTGGTGCAAAACAA | 74 | 374 |
| 757263 | 3054 | 3073 | 115909 | 115928 | GATACATCATATTTGGTGCA | 32 | 375 |
| 757264 | 3060 | 3079 | 115915 | 115934 | GGACTGGATACATCATATTT | 94 | 376 |
| 757265 | 3066 | 3085 | 115921 | 115940 | TCACTGGGACTGGATACATC | 83 | 377 |
| 757266 | 3079 | 3098 | 115934 | 115953 | TGCACGCCTGGGCTCACTGG | 70 | 378 |
| 757267 | 3085 | 3104 | N/A | N/A | AAAGGTTGCACGCCTGGGCT | 27 | 379 |
| 757268 | 3091 | 3110 | N/A | N/A | GGGTATAAAGGTTGCACGCC | 97 | 380 |
| 757269 | 3097 | 3116 | N/A | N/A | GGTATTGGGTATAAAGGTTG | 32 | 381 |
| 757270 | 3103 | 3122 | 116339 | 116358 | GTCATAGGTATTGGGTATAA | 60 | 382 |
| 757271 | 3122 | 3141 | 116358 | 116377 | TTGATTCACTGGCATGGGCG | 78 | 383 |
| 757272 | 3128 | 3147 | 116364 | 116383 | CTTGGCTTGATTCACTGGCA | 30 | 384 |
| 757273 | 3134 | 3153 | 116370 | 116389 | ATATGTCTTGGCTTGATTCA | 68 | 385 |
| 757274 | 3140 | 3159 | 116376 | 116395 | TGCTCTATATGTCTTGGCTT | 51 | 386 |
| 757275 | 3146 | 3165 | N/A | N/A | TGGTACTGCTCTATATGTCT | 42 | 387 |
| 757276 | 3152 | 3171 | N/A | N/A | CATATTTGGTACTGCTCTAT | 105 | 388 |
| 757277 | 3173 | 3192 | 130937 | 130956 | CTGGTCTTGCCGCTGTTGGG | 48 | 389 |
| 757278 | 3179 | 3198 | 130943 | 130962 | ATGATGCTGGTCTTGCCGCT | 49 | 390 |
| 757279 | 3185 | 3204 | 130949 | 130968 | ACTCTGATGATGCTGGTCTT | 98 | 391 |
| 757280 | 3191 | 3210 | 130955 | 130974 | CATGGCACTCTGATGATGCT | 120 | 392 |
| 757281 | 3197 | 3216 | 130961 | 130980 | GTGCATCATGGCACTCTGAT | 42 | 393 |
| 757282 | 3203 | 3222 | 130967 | 130986 | CGCTGGGTGCATCATGGCAC | 37 | 394 |
| 757283 | 3220 | 3239 | 130984 | 131003 | GGTGGGCCCGCTGCTGACGC | 60 | 395 |
| 757284 | 3226 | 3245 | 130990 | 131009 | GCAATCGGTGGGCCCGCTGC | 62 | 396 |
| 757285 | 3232 | 3251 | 130996 | 131015 | GTGGCTGCAATCGGTGGGCC | 57 | 397 |
| 757286 | 3269 | 3288 | 131033 | 131052 | ACTGTAGGCAACATATTGCG | 108 | 398 |
| 757287 | 3275 | 3294 | 131039 | 131058 | CTGAGGACTGTAGGCAACAT | 48 | 399 |
| 757288 | 3311 | 3330 | 131075 | 131094 | TGGCACATGCTGAACAAGGG | 32 | 400 |
| 757289 | 3317 | 3336 | 131081 | 131100 | ATAATGTGGCACATGCTGAA | 138 | 401 |
| 757290 | 3323 | 3342 | 131087 | 131106 | AGACTGATAATGTGGCACAT | 64 | 402 |
| 757291 | 3329 | 3348 | N/A | N/A | ATGCTGAGACTGATAATGTG | 77 | 403 |
| 757292 | 3335 | 3354 | N/A | N/A | ATGAGGATGCTGAGACTGAT | 81 | 404 |
| 757293 | 3341 | 3360 | N/A | N/A | ATAGACATGAGGATGCTGAG | 85 | 405 |
| 757294 | 3347 | 3366 | 131428 | 131447 | AGGACTATAGACATGAGGAT | 25 | 406 |
| 757295 | 3353 | 3372 | 131434 | 131453 | TATTACAGGACTATAGACAT | 58 | 407 |
| 757296 | 3359 | 3378 | 131440 | 131459 | ACCCTGTATTACAGGACTAT | 81 | 408 |
| 757297 | 3365 | 3384 | 131446 | 131465 | AGCATTACCCTGTATTACAG | 45 | 409 |
| 757298 | 3371 | 3390 | 131452 | 131471 | CATTCTAGCATTACCCTGTA | 90 | 410 |
| 757299 | 3377 | 3396 | 131458 | 131477 | TGCCATCATTCTAGCATTAC | 73 | 411 |
| 757300 | 3383 | 3402 | 131464 | 131483 | TGGTGGTGCCATCATTCTAG | 51 | 412 |
| 757301 | 3408 | 3427 | 131489 | 131508 | ATACTAAACCAGGCTGGGCG | 85 | 413 |
| 757302 | 3414 | 3433 | 131495 | 131514 | AAGAAGATACTAAACCAGGC | 41 | 414 |
| 757303 | 3420 | 3439 | 131501 | 131520 | TTGCTGAAGAAGATACTAAA | 81 | 415 |

TABLE 6
Percent control of human ATXN2 RNA with 5-10-5 MOE gapmers
with mixed internucleoside linkages at 2,000 nM concentration

| | SEQ ID | SEQ ID | SEQ ID | SEQ ID | | | |
|---|---|---|---|---|---|---|---|
| | NO: 1 | NO: 1 | NO: 2 | NO: 2 | | | SEQ |
| Compound | Start | Stop | Start | Stop | | ATXN2 % | ID |
| Number | Site | Site | Site | Site | Sequence (5′ to 3′) | control | NO |
| 708199 | 1477 | 1496 | 81637 | 81656 | GCTAACTGGTTTGCCCTTGC | 19 | 32 |
| 708398 | 3476 | 3495 | N/A | N/A | TGGTAATTTGGGACATGCAT | 45 | 416 |
| 708400 | 3494 | 3513 | 136967 | 136986 | GCTTGTCTCCTTGTTGTATG | 49 | 417 |
| | | | 147866 | 147885 | | | |
| 708435 | 3897 | 3916 | N/A | N/A | GTACATGAGCCTGAGGTACG | 112 | 418 |
| 708440 | 3951 | 3970 | N/A | N/A | TCATTAGCATCATTGGCGCA | 49 | 419 |
| 757304 | 3426 | 3445 | 131507 | 131526 | ACTGAGTTGCTGAAGAAGAT | 85 | 420 |
| 757305 | 3432 | 3451 | 131513 | 131532 | CCCCGTACTGAGTTGCTGAA | 63 | 421 |
| 757306 | 3438 | 3457 | 131519 | 131538 | CATGAGCCCCGTACTGAGTT | 79 | 422 |
| 757307 | 3444 | 3463 | 131525 | 131544 | TCTGCTCATGAGCCCCGTAC | 70 | 423 |
| 757308 | 3464 | 3483 | N/A | N/A | ACATGCATACATCGCATGCG | 98 | 424 |
| 757309 | 3470 | 3489 | N/A | N/A | TTTGGGACATGCATACATCG | 111 | 425 |
| 757310 | 3482 | 3501 | 136955 | 136974 | GTTGTATGGTAATTTGGGAC | 56 | 426 |
| 757311 | 3488 | 3507 | 136961 | 136980 | CTCCTTGTTGTATGGTAATT | 32 | 427 |
| 757312 | 3500 | 3519 | 136973 | 136992 | AGAAGGGCTTGTCTCCTTGT | 63 | 428 |
| 757313 | 3506 | 3525 | 136979 | 136998 | GTAGAAAGAAGGGCTTGTCT | 70 | 429 |
| 757314 | 3512 | 3531 | 136985 | 137004 | GGCAAAGTAGAAAGAAGGGC | 54 | 430 |
| 757315 | 3518 | 3537 | N/A | N/A | GGAAATGGCAAAGTAGAAAG | 97 | 431 |
| 757316 | 3524 | 3543 | N/A | N/A | GCCCGTGGAAATGGCAAAGT | 97 | 432 |
| 757317 | 3530 | 3549 | N/A | N/A | AAGGGAGCCCGTGGAAATGG | 74 | 433 |
| 757318 | 3536 | 3555 | 144311 | 144330 | CTGAGCAAGGGAGCCCGTGG | 82 | 434 |
| 757319 | 3542 | 3561 | 144317 | 144336 | ATACTGCTGAGCAAGGGAGC | 54 | 435 |
| 757320 | 3548 | 3567 | 144323 | 144342 | GTGCGCATACTGCTGAGCAA | 61 | 436 |
| 757321 | 3554 | 3573 | 144329 | 144348 | GTTAGGGTGCGCATACTGCT | 52 | 437 |
| 757322 | 3579 | 3598 | 144354 | 144373 | GTGGAGTATGTGGGTGCAGG | 89 | 438 |
| 757323 | 3586 | 3605 | 144361 | 144380 | TGAGGGTGTGGAGTATGTGG | 94 | 439 |
| 757324 | 3592 | 3611 | 144367 | 144386 | GAAGGCTGAGGGTGTGGAGT | 85 | 440 |
| 757325 | 3598 | 3617 | 144373 | 144392 | GTAGCTGAAGGCTGAGGGTG | 70 | 441 |
| 757326 | 3619 | 3638 | 144394 | 144413 | CTTTGCTGCTGTCCAGTGGG | 43 | 442 |
| 757327 | 3625 | 3644 | 144400 | 144419 | TGTTGGCTTTGCTGCTGTCC | 55 | 443 |
| 757328 | 3631 | 3650 | 144406 | 144425 | CCACCATGTTGGCTTTGCTG | 60 | 444 |
| 757329 | 3637 | 3656 | 144412 | 144431 | TGACTTCCACCATGTTGGCT | 64 | 445 |
| 757330 | 3643 | 3662 | 144418 | 144437 | GCAGGATGACTTCCACCATG | 62 | 446 |
| 757331 | 3649 | 3668 | 144424 | 144443 | CTGGGTGCAGGATGACTTCC | 61 | 447 |
| 757332 | 3656 | 3675 | 144431 | 144450 | AACAGGACTGGGTGCAGGAT | 80 | 448 |
| 757333 | 3666 | 3685 | N/A | N/A | GATGGTGCTGAACAGGACTG | 67 | 449 |
| 757334 | 3672 | 3691 | N/A | N/A | GGTGCTGATGGTGCTGAACA | 64 | 450 |
| 757335 | 3678 | 3697 | 145410 | 145429 | CGGCCTGGTGCTGATGGTGC | 50 | 451 |
| 757336 | 3684 | 3703 | 145416 | 145435 | CCTGGGCGGCCTGGTGCTGA | 64 | 452 |
| 757337 | 3690 | 3709 | 145422 | 145441 | GGAGAGCCTGGGCGGCCTGG | 74 | 453 |
| 757338 | 3696 | 3715 | 145428 | 145447 | CCAGATGGAGAGCCTGGGCG | 81 | 454 |
| 757339 | 3702 | 3721 | 145434 | 145453 | GACTGGCCAGATGGAGAGCC | 82 | 455 |
| 757340 | 3708 | 3727 | 145440 | 145459 | GCTGTGGACTGGCCAGATGG | 84 | 456 |
| 757341 | 3714 | 3733 | 145446 | 145465 | ACTGCTGCTGTGGACTGGCC | 62 | 457 |
| 757342 | 3720 | 3739 | 145452 | 145471 | TGGCTGACTGCTGCTGTGGA | 42 | 458 |
| 757343 | 3726 | 3745 | 145458 | 145477 | GGTAAATGGCTGACTGCTGC | 54 | 459 |
| 757344 | 3747 | 3766 | 145479 | 145498 | GAGTTGGCGCAAGCCCCGCG | 62 | 460 |
| 757345 | 3753 | 3772 | 145485 | 145504 | AGGGTGGAGTTGGCGCAAGC | 88 | 461 |
| 757346 | 3759 | 3778 | 145491 | 145510 | TCATGGAGGGTGGAGTTGGC | 97 | 462 |
| 757347 | 3765 | 3784 | 145497 | 145516 | CAGGTGTCATGGAGGGTGGA | 103 | 463 |
| 757348 | 3771 | 3790 | 145503 | 145522 | TGGAGGCAGGTGTCATGGAG | 111 | 464 |
| 757349 | 3794 | 3813 | 145526 | 145545 | ACTATTCTGTGGCGACTGCG | 57 | 465 |
| 757350 | 3800 | 3819 | 145532 | 145551 | TGGGAAACTATTCTGTGGCG | 61 | 466 |
| 757351 | 3806 | 3825 | 145538 | 145557 | TGCTGCTGGGAAACTATTCT | 71 | 467 |
| 757352 | 3812 | 3831 | 145544 | 145563 | CTGTTGTGCTGCTGGGAAAC | 57 | 468 |
| 757353 | 3818 | 3837 | 145550 | 145569 | GACAGTCTGTTGTGCTGCTG | 67 | 469 |
| 757354 | 3824 | 3843 | 145556 | 145575 | CGTAAAGACAGTCTGTTGTG | 61 | 470 |
| 757355 | 3858 | 3877 | 145590 | 145609 | TGGTATACGCCGGCTGAACG | 57 | 471 |
| 757356 | 3864 | 3883 | 145596 | 145615 | GTGGGTTGGTATACGCCGGC | 75 | 472 |
| 757357 | 3903 | 3922 | 147818 | 147837 | CTGACTGTACATGAGCCTGA | 77 | 473 |
| 757358 | 3909 | 3928 | 147824 | 147843 | CCATTCCTGACTGTACATGA | 53 | 474 |
| 757359 | 3915 | 3934 | 147830 | 147849 | AAGGAACCATTCCTGACTGT | 63 | 475 |
| 757360 | 3921 | 3940 | 147836 | 147855 | GATGAGAAGGAACCATTCCT | 64 | 476 |
| 757361 | 3927 | 3946 | 147842 | 147861 | CAGTTGGATGAGAAGGAACC | 77 | 477 |
| 757362 | 3933 | 3952 | 147848 | 147867 | CATGGGCAGTTGGATGAGAA | 71 | 478 |
| 757363 | 3939 | 3958 | 147854 | 147873 | TTGGCGCATGGGCAGTTGGA | 75 | 479 |
| 757364 | 3945 | 3964 | 147860 | 147879 | GCATCATTGGCGCATGGGCA | 39 | 480 |
| 757365 | 3971 | 3990 | 147886 | 147905 | ACCGCCGGGTGGCTGTGTCG | 79 | 481 |
| 757366 | 3993 | 4012 | 147908 | 147927 | TTTGAGCGAGGGCGGCCTGG | 105 | 482 |
| 757367 | 3999 | 4018 | 147914 | 147933 | GTGCACTTTGAGCGAGGGCG | 80 | 483 |
| 757368 | 4011 | 4030 | 147926 | 147945 | GAATGGGCTGTAGTGCACTT | 44 | 484 |
| 757369 | 4017 | 4036 | 147932 | 147951 | AGACTGGAATGGGCTGTAGT | 67 | 485 |
| 757370 | 4023 | 4042 | 147938 | 147957 | TTGTCGAGACTGGAATGGGC | 61 | 486 |
| 757371 | 4029 | 4048 | 147944 | 147963 | GCGCTGTTGTCGAGACTGGA | 42 | 487 |
| 757372 | 4035 | 4054 | 147950 | 147969 | GGAAATGCGCTGTTGTCGAG | 35 | 488 |
| 757373 | 4064 | 4083 | N/A | N/A | GGCTTGTACTGAAGGGTGCG | 90 | 489 |
| 757374 | 4070 | 4089 | N/A | N/A | GTGGTGGGCTTGTACTGAAG | 69 | 490 |
| 757375 | 4076 | 4095 | 148827 | 148846 | CTGTTGGTGGTGGGCTTGTA | 90 | 491 |
| 757376 | 4082 | 4101 | 148833 | 148852 | CAACTGCTGTTGGTGGTGGG | 79 | 492 |

### Example 2: Effect of 5-10-5 MOE Gapmers with Mixed Internucleoside Linkages on Human ATXN2 RNA Expression in Vitro, Single Dose

[0502] Modified oligonucleotides complementary to a human ATXN2 nucleic acid were designed and tested for their effect on ATXN2 RNA in vitro.

[0503] Cultured A431 cells at a density of 10,000 cells per well were transfected via free uptake with 5,000 nM concentration of modified oligonucleotide or no modified oligonucleotide for untreated controls. After approximately 24 hours, RNA was isolated from the cells and ATXN2 RNA levels were measured by quantitative real-time PCR. Human primer probe set RTS5049 (forward sequence CTACAGTCCTCAGCAGTCC, designated herein as SEQ ID NO: 13; reverse sequence GCCATCATTCTAGCATTACCCT, designated herein as SEQ ID NO: 14; probe sequence ATCAGCCCCTTrGTCAGCATGTG, designated herein as SEQ ID: 15) was used to measure RNA levels. ATXN2 RNA levels were adjusted according to total RNA content, as measured by RIBOGREEN®. Results are presented in the tables below as percent control ATXN2 RNA levels relative to untreated control cells.

[0504] The modified oligonucleotides in the tables below are 5-10-5 MOE gapmers. The gapmers are 20 nucleobases in length, wherein the central gap segment comprises ten 2′-deoxynucleosides and is flanked by wing segments on both the 5′ end and on the 3′ end comprising five 2′-MOE nucleosides. The sugar motif for the gapmers is (from 5′ to 3′): eeeeeddddddddddeeeee; wherein ‘d’ represents a 2′-deoxyribose sugar and ‘e’ represents a 2′-MOE modified sugar. The internucleoside linkages are mixed phosphodiester and phosphorothioate linkages. The internucleoside linkage motif for the gapmers is (from 5′ to 3′): soooossssssssssooss; wherein ‘o’ represents a phosphodiester internucleoside linkage and s′ represents a phosphorothioate internucleoside linkage. Each cytosine residue is a 5-methyl cytosine. “Start Site” indicates the 5′-most nucleoside to which the gapmer is complementary in the human nucleic acid sequence. “Stop Site” indicates the 3′-most nucleoside to which the gapmer is complementary in the human nucleic acid sequence.

[0505] Each modified oligonucleotide listed in the tables below is complementary to human ATXN2 nucleic acid sequences SEQ ID NO: 1 or SEQ ID NO: 2, as indicated. ‘N/A’ indicates that the modified oligonucleotide is not complementary to that particular nucleic acid with 100% complementarity. As shown below, modified oligonucleotides complementary to the nucleobase sequence of human ATXN2 RNA reduced the amount of human ATXN2 RNA.

TABLE 8
Percent control of human ATXN2 RNA with 5-10-5 MOE gapmers
with mixed internucleoside linkages

| | SEQ ID | SEQ ID | SEQ ID | SEQ ID | | | |
|---|---|---|---|---|---|---|---|
| | NO: 1 | NO: 1 | NO: 2 | NO: 2 | | | |
| Compound | Start | Stop | Start | Stop | | ATXN2 % | SEQ |
| Number | Site | Site | Site | Site | Sequence (5′ to 3′) | control | ID NO |
| 708199 | 1477 | 1496 | 81637 | 708199 | GCTAACTGGTTTGCCCTTGC | 29 | 32 |
| 874154 | 5 | 24 | 1995 | 874154 | GCGCTGGGTTGCTTTCTCGG | 104 | 493 |
| 874178 | 246 | 265 | 2236 | 874178 | CCGGCCGCTGGAGCGAGCGC | 85 | 494 |
| 874202 | 469 | 488 | 2459 | 874202 | AGAAGGAGGACGACGAAGGG | 89 | 495 |
| 874224 | 1305 | 1324 | 76442 | 874224 | AAGCCTCAAGTTCCTCATTG | 110 | 496 |
| 874247 | 1561 | 1580 | 81721 | 874247 | GCTGTGTATTTTTCTTCCTC | 24 | 497 |
| 874271 | 2358 | 2377 | 91242 | 874271 | CTCTGTTCGATGCAGGACTA | 86 | 498 |
| 874295 | 2672 | 2691 | 112981 | 874295 | AGAATCCTTAGCACTTGGTT | 45 | 499 |
| 874319 | 3127 | 3146 | 116363 | 874319 | TTGGCTTGATTCACTGGCAT | 89 | 500 |
| 874341 | 4116 | 4135 | 148867 | 874341 | AATTTGGCCTTTCGGTTCCT | 64 | 501 |
| 874365 | 4272 | 4291 | 149023 | 874365 | TGCCTCTACTCGGTCCAAGT | 74 | 502 |
| 874389 | 4422 | 4441 | 149173 | 874389 | TCTTGTTACTTCTTTTGCTA | 63 | 503 |
| 874412 | 4603 | 4622 | 149354 | 874412 | CTTAACTTAAAAGTTGAACC | 118 | 504 |
| 874436 | N/A | N/A | 146563 | 874436 | TCTAGCCCACACCTTGCCAG | 114 | 505 |
| 874484 | N/A | N/A | 3698 | 874484 | CGAACAGCAATGCGGATCGG | 97 | 506 |
| 874508 | N/A | N/A | 5223 | 874508 | GAATTTCCAGACTTTCAAGC | 48 | 507 |
| 874532 | N/A | N/A | 7785 | 874532 | TAACAAAGGATGATGCCATT | 67 | 508 |
| 874556 | N/A | N/A | 9958 | 874556 | TTGGGCAAGTCCCCTAATCT | 115 | 509 |
| 874580 | N/A | N/A | 13708 | 874580 | ACCAGCATGTTAGGAGGCCT | 95 | 510 |
| 874604 | N/A | N/A | 16563 | 874604 | TACTTCTTTGGGAGATATAA | 83 | 511 |
| 874628 | N/A | N/A | 18790 | 874628 | CAGGGTTTCCCCATGTTAGG | 98 | 512 |
| 874652 | N/A | N/A | 20571 | 874652 | AAGGAGCCAAGATTGCCCCA | 116 | 513 |
| 874676 | N/A | N/A | 25034 | 874676 | ACTGAGACTGTAGATGAGCC | 121 | 514 |
| 874700 | N/A | N/A | 28108 | 874700 | AAGCAATGGAACAGTTATTA | 46 | 515 |
| 874724 | N/A | N/A | 30929 | 874724 | CAGTCCCCTCCCAGTGCTAC | 78 | 516 |
| 874748 | N/A | N/A | 32488 | 874748 | GTTCAAATTCCGGCTCCATC | 32 | 517 |
| 874772 | N/A | N/A | 34639 | 874772 | TGTGGTAAAAAAGCAAGAGA | 70 | 518 |
| 874796 | N/A | N/A | 37016 | 874796 | AAATCAAGCAGAGCCAGGTG | 97 | 519 |
| 874820 | N/A | N/A | 38400 | 874820 | TCTTGGACAGAGGGAGTAAA | 93 | 520 |
| 874844 | N/A | N/A | 41510 | 874844 | AAAGCTCCACGGAAAACAAT | 108 | 521 |
| 874868 | N/A | N/A | 43617 | 874868 | TACATCTTTGACTAATAAAA | 95 | 522 |
| 874892 | N/A | N/A | 44608 | 874892 | ATTATAGAATATAATACAAC | 98 | 523 |
| 874916 | N/A | N/A | 46490 | 874916 | AAAAGCACATTAATTCAAAA | 89 | 524 |
| 874940 | N/A | N/A | 48167 | 874940 | TGTAAATTGTCATACTGTAT | 50 | 525 |
| 874964 | N/A | N/A | 50706 | 874964 | CTACAATTTACAACAGAATT | 79 | 526 |
| 874988 | N/A | N/A | 52791 | 874988 | GATTATAGACATGTGCCATC | 88 | 527 |
| 875012 | N/A | N/A | 55320 | 875012 | TTCTGTAAAGAGACAGTCAA | 100 | 528 |
| 875036 | N/A | N/A | 57881 | 875036 | AAACTGTGAACACCATGAAA | 102 | 529 |
| 875060 | N/A | N/A | 60512 | 875060 | GTTTTGTTTAATCACAGTTT | 32 | 530 |
| 875084 | N/A | N/A | 62556 | 875084 | CATTTTCTCCATTAGGCTTC | 84 | 531 |
| 875108 | N/A | N/A | 64420 | 875108 | AAAGAAAGAAGTACTAATAC | 108 | 532 |
| 875132 | N/A | N/A | 67160 | 875132 | ATATACTAGACACCATGGTT | 78 | 533 |
| 875156 | N/A | N/A | 69694 | 875156 | CTGTTGGCATAGTAACATAC | 74 | 534 |
| 875180 | N/A | N/A | 71679 | 875180 | TAACCATTTCTTCTCAACTA | 116 | 535 |
| 875204 | N/A | N/A | 73162 | 875204 | GTTGTGTTAAGAGGGCATTA | 86 | 536 |
| 875228 | N/A | N/A | 74868 | 875228 | TTTTGTTTTTAACTTTCCAT | 107 | 537 |
| 875252 | N/A | N/A | 77333 | 875252 | GATATGTTACAAATTCTCTT | 40 | 538 |
| 875276 | N/A | N/A | 79712 | 875276 | CTAATGTTTCAACTCCTTTT | 73 | 539 |
| 875300 | N/A | N/A | 81860 | 875300 | AAAGGAAGAGGAAATATAAT | 104 | 540 |
| 875324 | N/A | N/A | 83038 | 875324 | GTCCCTTCCCTTAGATTCTG | 49 | 541 |
| 875348 | N/A | N/A | 84816 | 875348 | CTGGTTCCTTACAATTATCT | 25 | 542 |
| 875372 | N/A | N/A | 86229 | 875372 | TTTGATATGTGGCAATGATG | 54 | 543 |
| 875396 | N/A | N/A | 89279 | 875396 | AACAAAGCACTAAGGACTGA | 73 | 544 |
| 875420 | N/A | N/A | 91499 | 875420 | ACCAATAATTTTATTTATGT | 107 | 545 |
| 875444 | N/A | N/A | 93243 | 875444 | TTGTATGTGTTAACTATTGT | 56 | 546 |
| 875468 | N/A | N/A | 96231 | 875468 | CAGAACAGGAGAAAACATTT | 101 | 547 |
| 875492 | N/A | N/A | 98219 | 875492 | GTTAGACAAGATTTAACATA | 70 | 548 |
| 875516 | N/A | N/A | 99997 | 875516 | GGTATTTATGTGGGCACACT | 65 | 549 |
| 875540 | N/A | N/A | 102876 | 875540 | AAATGAACAAAACGGGAGGA | 122 | 550 |
| 875564 | N/A | N/A | 106246 | 875564 | AACAATATTCCATGCAAATG | 123 | 551 |
| 875588 | N/A | N/A | 109670 | 875588 | ACTGAAAGTAAAGACCCAGT | 111 | 552 |
| 875612 | N/A | N/A | 111907 | 875612 | GTGATACCCTGTCTCATTTA | 68 | 553 |
| 875636 | N/A | N/A | 113969 | 875636 | CAACTCCTAACCTCAAGTAA | 98 | 554 |
| 875660 | N/A | N/A | 116228 | 875660 | CTAGGCATGAGAAGGTTTCC | 114 | 555 |
| 875684 | N/A | N/A | 119113 | 875684 | GTTAGAATGTGACTCTCCCA | 50 | 556 |
| 875708 | N/A | N/A | 121999 | 875708 | CTGGGACGGCTTTGAATGTG | 76 | 557 |
| 875732 | N/A | N/A | 125533 | 875732 | CAAATTTTTAAATTGTTTTG | 111 | 558 |
| 875756 | N/A | N/A | 128616 | 875756 | TGAGGCTGACACAGGCAGAC | 103 | 559 |
| 875780 | N/A | N/A | 130619 | 875780 | CTTGATCAAGTCCCTGTAAC | 72 | 560 |
| 875804 | N/A | N/A | 132522 | 875804 | ATGTAGTTACATGTAACCAT | 37 | 561 |
| 875828 | N/A | N/A | 134584 | 875828 | GCAGATTTAATGAAGAACAT | 109 | 562 |
| 875852 | N/A | N/A | 137143 | 875852 | TCCATTTTAAAAACTGAATT | 86 | 563 |
| 875876 | N/A | N/A | 139105 | 875876 | AATAAAAGGCAACTTGACCA | 75 | 564 |
| 875900 | N/A | N/A | 141644 | 875900 | ACTGCACCCGGCCTAAAAAT | 101 | 565 |
| 875924 | N/A | N/A | 143719 | 875924 | ATCTCCCATCTTTGCTTTAT | 85 | 566 |
| 875948 | N/A | N/A | 145875 | 875948 | CATTCCAGAGTCAAAGATAT | 99 | 567 |
| 875972 | N/A | N/A | 147334 | 875972 | CACAGTCAAGTATGTGAATT | 96 | 568 |

TABLE 9
Percent control of human ATXN2 RNA with 5-10-5 MOE gapmers
with mixed internucleoside linkages

| | SEQ ID | SEQ ID | SEQ ID | SEQ ID | | | |
|---|---|---|---|---|---|---|---|
| | NO: 1 | NO: 1 | NO: 2 | NO: 2 | | | |
| Compound | Start | Stop | Start | Stop | | ATXN2 % | SEQ |
| Number | Site | Site | Site | Site | Sequence (5′ to 3′) | control | ID NO |
| 708199 | 1477 | 1496 | 81637 | 81656 | GCTAACTGGTTTGCCCTTGC | 58 | 32 |
| 874155 | 10 | 29 | 2000 | 2019 | GCGGCGCGCTGGGTTGCTTT | 90 | 569 |
| 874179 | 251 | 270 | 2241 | 2260 | CCGCGCCGGCCGCTGGAGCG | 134 | 570 |
| 874203 | 511 | 530 | 2501 | 2520 | CGGGTTGGCGCGGCCGGAGG | 118 | 571 |
| 874225 | 1317 | 1336 | 76454 | 76473 | CGTCATTTTCCAAAGCCTCA | 60 | 572 |
| 874248 | 1585 | 1604 | 81745 | 81764 | CGTTCACTGGAATTTCTCTG | 61 | 573 |
| 874272 | 2360 | 2379 | 91244 | 91263 | AGCTCTGTTCGATGCAGGAC | 54 | 574 |
| 874296 | 2674 | 2693 | 112983 | 113002 | AAAGAATCCTTAGCACTTGG | 75 | 575 |
| 874320 | 3129 | 3148 | 116365 | 116384 | TCTTGGCTTGATTCACTGGC | 90 | 576 |
| 874342 | 4121 | 4140 | 148872 | 148891 | GAGGGAATTTGGCCTTTCGG | 97 | 577 |
| 874366 | 4277 | 4296 | 149028 | 149047 | CTAAATGCCTCTACTCGGTC | 68 | 578 |
| 874390 | 4440 | 4459 | 149191 | 149210 | AATAGCAGCAAGAATCACTC | 84 | 579 |
| 874413 | 4608 | 4627 | 149359 | 149378 | TTTCCCTTAACTTAAAAGTT | 81 | 580 |
| 874437 | N/A | N/A | 146568 | 146587 | GCATCTCTAGCCCACACCTT | 82 | 581 |
| 874461 | N/A | N/A | 3425 | 3444 | GGGAGAGAGCCCCGACAGAC | 114 | 582 |
| 874485 | N/A | N/A | 3703 | 3722 | GGCCTCGAACAGCAATGCGG | 84 | 583 |
| 874509 | N/A | N/A | 5239 | 5258 | TTCTTAAAGCAGATGTGAAT | 103 | 584 |
| 874533 | N/A | N/A | 7805 | 7824 | TCAATGTGCACATAAAAGAA | 113 | 585 |
| 874557 | N/A | N/A | 9975 | 9994 | ATCCTACAAATATTGCTTTG | 88 | 586 |
| 874581 | N/A | N/A | 13824 | 13843 | TTACAAAGACTTCATTATAG | 84 | 587 |
| 874605 | N/A | N/A | 16684 | 16703 | TTTCAATAATGCAATGCATC | 96 | 588 |
| 874629 | N/A | N/A | 18946 | 18965 | GTCGCCCAGCAGGCTGGAGT | 108 | 589 |
| 874653 | N/A | N/A | 20901 | 20920 | GAAAAAATAAAAAGGAGAGA | 92 | 590 |
| 874677 | N/A | N/A | 25039 | 25058 | GAGTCACTGAGACTGTAGAT | 98 | 591 |
| 874701 | N/A | N/A | 28112 | 28131 | TTAGAAGCAATGGAACAGTT | 95 | 592 |
| 874725 | N/A | N/A | 30931 | 30950 | GGCAGTCCCCTCCCAGTGCT | 73 | 593 |
| 874749 | N/A | N/A | 32518 | 32537 | CAAGAACTAATATCAGCATT | 71 | 594 |
| 874773 | N/A | N/A | 34663 | 34682 | TTCAGTAGAGCAAGTAACTG | 89 | 595 |
| 874797 | N/A | N/A | 37036 | 37055 | AACAGCAATACAACAATTAA | 102 | 596 |
| 874821 | N/A | N/A | 38419 | 38438 | GTAACAATCCTGGATTGGTT | 87 | 597 |
| 874845 | N/A | N/A | 41559 | 41578 | CAAAGAAGCGCAAATTTGAT | 117 | 598 |
| 874869 | N/A | N/A | 43662 | 43681 | TCCCCTTTAAATAAGTCACA | 103 | 599 |
| 874893 | N/A | N/A | 44669 | 44688 | AGAAAAGATGCAGTACACAA | 91 | 600 |
| 874917 | N/A | N/A | 46497 | 46516 | GCAGAAAAAAAGCACATTAA | 89 | 601 |
| 874941 | N/A | N/A | 48294 | 48313 | CGAATTACATAATACTTAAG | 87 | 602 |
| 874965 | N/A | N/A | 50719 | 50738 | AAATTGTACTGAACTACAAT | 92 | 603 |
| 874989 | N/A | N/A | 52916 | 52935 | GAAAATAAAGCACAAATTCT | 108 | 604 |
| 875013 | N/A | N/A | 55467 | 55486 | AATCAAAGCATGCAATTAGT | 84 | 605 |
| 875037 | N/A | N/A | 57947 | 57966 | GCTTTGCTATCTCTAACTCT | 94 | 606 |
| 875061 | N/A | N/A | 60556 | 60575 | AATTAAACAAATTCACAGAT | 127 | 607 |
| 875085 | N/A | N/A | 62584 | 62603 | TACTGTTTATGGGTGAACAT | 81 | 608 |
| 875109 | N/A | N/A | 64468 | 64487 | AAATGTAGTGTACCTGTGTA | 110 | 609 |
| 875133 | N/A | N/A | 67289 | 67308 | ATCACCACACTCCAACCTCA | 122 | 610 |
| 875157 | N/A | N/A | 69719 | 69738 | TGCAGTTATCAAAAACTAAA | 116 | 611 |
| 875181 | N/A | N/A | 71692 | 71711 | CAAAATCCTCAGCTAACCAT | 128 | 612 |
| 875205 | N/A | N/A | 73171 | 73190 | AGAATTTAGGTTGTGTTAAG | 93 | 613 |
| 875229 | N/A | N/A | 75201 | 75220 | CAGACCGGAGTGCAGTGACA | 108 | 614 |
| 875253 | N/A | N/A | 77463 | 77482 | GAATTAATGACATGTTGCCT | 94 | 615 |
| 875277 | N/A | N/A | 79953 | 79972 | GTAACTCCACAATTCTACGA | 110 | 616 |
| 875301 | N/A | N/A | 81905 | 81924 | AGATCTTAAACCAATTCTAC | 110 | 617 |
| 875325 | N/A | N/A | 83430 | 83449 | TGATATTGACAAGTCTGGTC | 56 | 618 |
| 875349 | N/A | N/A | 84836 | 84855 | ATTATATCCAATTAGAAATG | 98 | 619 |
| 875373 | N/A | N/A | 86281 | 86300 | ATATGGGTGGCATTTAAATT | 111 | 620 |
| 875397 | N/A | N/A | 89309 | 89328 | TTGTAAGCTCTTGCTTACCA | 95 | 621 |
| 875421 | N/A | N/A | 91828 | 91847 | GTATGGGCATGAAATTAGAC | 66 | 622 |
| 875445 | N/A | N/A | 93318 | 93337 | TTAACTGTGTTAGAATGCTT | 36 | 623 |
| 875469 | N/A | N/A | 96243 | 96262 | AAAGACAACCAACAGAACAG | 76 | 624 |
| 875493 | N/A | N/A | 98273 | 98292 | CAAGCTGCCTAATATACACA | 100 | 625 |
| 875517 | N/A | N/A | 100105 | 100124 | GCTCTTGGTGTCATGGCAAA | 101 | 626 |
| 875541 | N/A | N/A | 102894 | 102913 | CAAAAGCCATACTGAGCAAA | 96 | 627 |
| 875565 | N/A | N/A | 106257 | 106276 | AAGAGCTGGAAAACAATATT | 97 | 628 |
| 875589 | N/A | N/A | 109713 | 109732 | CAGCATTTCTAGACACACCC | 88 | 629 |
| 875613 | N/A | N/A | 112340 | 112359 | CACATAAAACAATAGCACCA | 85 | 630 |
| 875637 | N/A | N/A | 114253 | 114272 | AAAGACAGTAGCTACTTATG | 73 | 631 |
| 875661 | N/A | N/A | 116230 | 116249 | AGCTAGGCATGAGAAGGTTT | 77 | 632 |
| 875685 | N/A | N/A | 119136 | 119155 | TTAAAAAGACAGTACCTCCT | 100 | 633 |
| 875709 | N/A | N/A | 122055 | 122074 | TACACTGTTTAGGACACACA | 78 | 634 |
| 875733 | N/A | N/A | 125689 | 125708 | CACACACTTTAAATACAGGG | 47 | 635 |
| 875757 | N/A | N/A | 128698 | 128717 | TCATTTCTTCTCAAGTTAAT | 100 | 636 |
| 875781 | N/A | N/A | 130627 | 130646 | CCCTCAGACTTGATCAAGTC | 119 | 637 |
| 875805 | N/A | N/A | 132529 | 132548 | AATGCCCATGTAGTTACATG | 54 | 638 |
| 875829 | N/A | N/A | 134590 | 134609 | ATCACTGCAGATTTAATGAA | 94 | 639 |
| 875853 | N/A | N/A | 137205 | 137224 | AAAAATTGATTTCTGAAACA | 108 | 640 |
| 875877 | N/A | N/A | 139231 | 139250 | GCACAAGTCATAAGAGATCA | 45 | 641 |
| 875901 | N/A | N/A | 141780 | 141799 | GGGATTACCTGGCTAATTTT | 75 | 642 |
| 875925 | N/A | N/A | 143835 | 143854 | TATGGTATGTGGCAAGGCCA | 103 | 643 |
| 875949 | N/A | N/A | 145895 | 145914 | AGGAAAGAAGGACTGGGTTG | 112 | 644 |
| 875973 | N/A | N/A | 147394 | 147413 | TTTTGCAGATAACATCCCTT | 68 | 645 |

### Example 3: Effect of 5-10-5 MOE Gapmers with Mixed Internucleoside Linkages on Human ATXN2 RNA Expression in Vitro, Single Dose

[0506] Modified oligonucleotides complementary to a human ATXN2 nucleic acid were designed and tested for their effect on ATXN2 RNA in vitro.

[0507] Cultured A431 cells at a density of 10,000 cells per well were transfected using electroporation with 6,000 nM concentration of modified oligonucleotide or no modified oligonucleotide for untreated controls. After approximately 24 hours, RNA was isolated from the cells and ATXN2 RNA levels were measured by quantitative real-time PCR as described in Example 2. Results are presented in the tables below as percent ATXN2 RNA Levels relative to untreated control cells. The modified oligonucleotides marked with an asterisk (*) target the amplicon region of the primer probe set. Additional assays may be used to measure the potency and efficacy of oligonucleotides targeting the amplicon region.

[0508] The modified oligonucleotides in the tables below are 5-10-5 MOE gapmers. The gapmers are 20 nucleobases in length, wherein the central gap segment comprises ten 2′-deoxynucleosides and is flanked by wing segments on both the 5′ end and on the 3′ end comprising five 2′-MOE nucleosides. The sugar motif for the gapmers is (from 5′ to 3′): eeeeeddddddddddeeeee; wherein ‘d’ represents a 2′-deoxyribose sugar and ‘e’ represents a 2′-MOE modified sugar. The internucleoside linkages are mixed phosphodiester and phosphorothioate linkages. The internucleoside linkage motif for the gapmers is (from 5′ to 3′): soooossssssssssooss; wherein ‘o’ represents a phosphodiester internucleoside linkage and ‘s’ represents a phosphorothioate internucleoside linkage. Each cytosine residue is a 5-methyl cytosine. “Start Site” indicates the 5′-most nucleoside to which the gapmer is complementary in the human nucleic acid sequence. “Stop Site” indicates the 3′-most nucleoside to which the gapmer is complementary in the human nucleic acid sequence.

[0509] Each modified oligonucleotide listed in the tables below is complementary to human ATXN2 nucleic acid sequences SEQ ID NO: 1 or SEQ ID NO: 2, as indicated. ‘N/A’ indicates that the modified oligonucleotide is not complementary to that particular nucleic acid with 100% complementarity. As shown below, modified oligonucleotides complementary to the nucleobase sequence of human ATXN2 reduced the amount of human ATXN2 RNA.

TABLE 10
Percent control of human ATXN2 RNA with 5-10-5 MOE gapmers
with mixed internucleoside linkages

| | SEQ ID | SEQ ID | SEQ ID | SEQ ID | | | |
|---|---|---|---|---|---|---|---|
| | NO: 1 | NO: 1 | NO: 2 | NO: 2 | | | |
| Compound | Start | Stop | Start | Stop | | ATXN2 % | SEQ |
| Number | Site | Site | Site | Site | Sequence (5′ to 3′) | control | ID NO |
| 708199 | 1477 | 1496 | 81637 | 81656 | GCTAACTGGTTTGCCCTTGC | 28 | 32 |
| 874156 | 18 | 37 | 2008 | 2027 | AGGAGCGGGCGGCGCGCTGG | 94 | 646 |
| 874180 | 256 | 275 | 2246 | 2265 | CTCCGCCGCGCCGGCCGCTG | 91 | 647 |
| 874204 | 516 | 535 | 2506 | 2525 | AGGCGCGGGTTGGCGCGGCC | 132 | 648 |
| 874226 | 1385 | 1404 | 80740 | 80759 | CGTAGACACTACACCATAAT | 52 | 649 |
| 874249 | 1646 | 1665 | 83257 | 83276 | TCTATTTCTTTGTCCAGGAG | 20 | 650 |
| 874273 | 2361 | 2380 | 91245 | 91264 | CAGCTCTGTTCGATGCAGGA | 36 | 651 |
| 874297 | 2675 | 2694 | 112984 | 113003 | GAAAGAATCCTTAGCACTTG | 41 | 652 |
| 874321 | 3130 | 3149 | 116366 | 116385 | GTCTTGGCTTGATTCACTGG | 49 | 653 |
| 874343 | 4137 | 4156 | 148888 | 148907 | AAGCAGTAGAAGGGAGGAGG | 93 | 654 |
| 874367 | 4282 | 4301 | 149033 | 149052 | AGTTCCTAAATGCCTCTACT | 49 | 655 |
| 874391 | 4445 | 4464 | 149196 | 149215 | GCAGTAATAGCAGCAAGAAT | 93 | 656 |
| 874414 | 4613 | 4632 | 149364 | 149383 | AAGTTTTTCCCTTAACTTAA | 73 | 657 |
| 874438 | N/A | N/A | 146573 | 146592 | GAGTCGCATCTCTAGCCCAC | 58 | 658 |
| 874462 | N/A | N/A | 3475 | 3494 | CACTTGTCTCCACCCCGTCC | 100 | 659 |
| 874486 | N/A | N/A | 3714 | 3733 | TTCTCCACTGCGGCCTCGAA | 45 | 660 |
| 874510 | N/A | N/A | 5251 | 5270 | ATTATGAAATGTTTCTTAAA | 73 | 661 |
| 874534 | N/A | N/A | 7835 | 7854 | TTTTTGGTCTAACTTCAGAG | 44 | 662 |
| 874558 | N/A | N/A | 9990 | 10009 | GAGAGGTGTAATAAAATCCT | 53 | 663 |
| 874582 | N/A | N/A | 13950 | 13969 | TGTTCAATAAAGCCTCTCAA | 65 | 664 |
| 874606 | N/A | N/A | 16689 | 16708 | AATTATTTCAATAATGCAAT | 88 | 665 |
| 874630 | N/A | N/A | 19022 | 19041 | AACAGAAAATATTAAGACTT | 133 | 666 |
| 874654 | N/A | N/A | 21088 | 21107 | CAGCTACTAAGGAGGCAGAA | 104 | 667 |
| 874678 | N/A | N/A | 25040 | 25059 | TGAGTCACTGAGACTGTAGA | 125 | 668 |
| 874702 | N/A | N/A | 28494 | 28513 | CCGGATTGTTTTCTTCATTA | 15 | 669 |
| 874726 | N/A | N/A | 30965 | 30984 | ATTTTGAAGCCCTTTTTCTT | 86 | 670 |
| 874750 | N/A | N/A | 32534 | 32553 | ACAATTACCATTCACACAAG | 108 | 671 |
| 874774 | N/A | N/A | 34867 | 34886 | CGCCCGCCACCACATCCCCG | 81 | 672 |
| 874798 | N/A | N/A | 37079 | 37098 | GTTTGCCCATCCTCACACTG | 78 | 673 |
| 874822 | N/A | N/A | 38436 | 38455 | ATACATGATAACCGAAGGTA | 44 | 674 |
| 874846 | N/A | N/A | 41631 | 41650 | GGAAAGAGAGCTGGGAGGAC | 71 | 675 |
| 874870 | N/A | N/A | 43690 | 43709 | AAGCTATATAAAAGACTTAA | 96 | 676 |
| 874894 | N/A | N/A | 44693 | 44712 | CTTTCCTTGCCAACTCTCTC | 138 | 677 |
| 874918 | N/A | N/A | 46532 | 46551 | TAAGACCAGAAAGCCAAAGG | 71 | 678 |
| 874942 | N/A | N/A | 48314 | 48333 | CCAGGACCTCCTTCAGATAC | 59 | 679 |
| 874966 | N/A | N/A | 50832 | 50851 | CTCCTAAGTCTAAGAGAAAG | 84 | 680 |
| 874990 | N/A | N/A | 53025 | 53044 | AACACTCTATCTATCCATTC | 71 | 681 |
| 875014 | N/A | N/A | 55577 | 55596 | TGATTTTTCACTAAATGTGA | 97 | 682 |
| 875038 | N/A | N/A | 58068 | 58087 | CACACCAGCACACCAGGCTA | 100 | 683 |
| 875062 | N/A | N/A | 60580 | 60599 | CTTATAAAGTCCTTCTCCAC | 127 | 684 |
| 875086 | N/A | N/A | 62923 | 62942 | TTTAGAAATGGTATCAGTTA | 69 | 685 |
| 875110 | N/A | N/A | 64474 | 64493 | TAAACAAAATGTAGTGTACC | 104 | 686 |
| 875134 | N/A | N/A | 67636 | 67655 | AAAAAACAGTTATTCCCTGG | 78 | 687 |
| 875158 | N/A | N/A | 69783 | 69802 | ATTCAGAATGTACTTAAATT | 91 | 688 |
| 875182 | N/A | N/A | 71785 | 71804 | TAAAAACTATAAAATGACAT | 94 | 689 |
| 875206 | N/A | N/A | 73172 | 73191 | CAGAATTTAGGTTGTGTTAA | 46 | 690 |
| 875230 | N/A | N/A | 75224 | 75243 | GAGATGGAGCTTGCTCTTTC | 80 | 691 |
| 875254 | N/A | N/A | 77472 | 77491 | AAAGTTTGAGAATTAATGAC | 85 | 692 |
| 875278 | N/A | N/A | 80006 | 80025 | CTCAGAAGTGGCAACTCTGG | 133 | 693 |
| 875302 | N/A | N/A | 81907 | 81926 | ACAGATCTTAAACCAATTCT | 67 | 694 |
| 875326 | N/A | N/A | 83480 | 83499 | TATGTAAACTATTTTAAGTA | 162 | 695 |
| 875350 | N/A | N/A | 84936 | 84955 | GATAATTTCACATAATAAAT | 98 | 696 |
| 875374 | N/A | N/A | 86298 | 86317 | GAAAACAGGTTTTTAATATA | 85 | 697 |
| 875398 | N/A | N/A | 89332 | 89351 | TGTTTGTTTGTTTTAAGTAT | 14 | 698 |
| 875422 | N/A | N/A | 92190 | 92209 | ACTGTATACATAACGCATTT | 80 | 699 |
| 875446 | N/A | N/A | 93885 | 93904 | CGTCTGTGGAGAAAGAAGTA | 102 | 700 |
| 875470 | N/A | N/A | 96308 | 96327 | AAAATCAGATAAATTGGACT | 67 | 701 |
| 875494 | N/A | N/A | 98278 | 98297 | TTGCCCAAGCTGCCTAATAT | 90 | 702 |
| 875518 | N/A | N/A | 100258 | 100277 | TTAGGACAACGGACCTAAGC | 103 | 703 |
| 875542 | N/A | N/A | 102896 | 102915 | AGCAAAAGCCATACTGAGCA | 71 | 704 |
| 875566 | N/A | N/A | 106280 | 106299 | AAATCACACATAGACTAAAA | 89 | 705 |
| 875590 | N/A | N/A | 109774 | 109793 | TCAGCCCCAGTACAATAAAG | 84 | 706 |
| 875614 | N/A | N/A | 112397 | 112416 | TAAGTAAAAGGAAGAGTATG | 98 | 707 |
| 875638 | N/A | N/A | 114258 | 114277 | GCTGAAAAGACAGTAGCTAC | 71 | 708 |
| 875662 | N/A | N/A | 116237 | 116256 | GCTAGAGAGCTAGGCATGAG | 47 | 709 |
| 875686 | N/A | N/A | 119146 | 119165 | ATCATTTCTATTAAAAAGAC | 90 | 710 |
| 875710 | N/A | N/A | 122060 | 122079 | ATTACTACACTGTTTAGGAC | 55 | 711 |
| 875734 | N/A | N/A | 125791 | 125810 | CACAAAAAGACACTTGTTAT | 86 | 712 |
| 875758 | N/A | N/A | 129116 | 129135 | AAAAAATGTACAAAACCTTA | 99 | 713 |
| 875782 | N/A | N/A | 130691 | 130710 | ATTCTGCTTCATCCTTCAGG | 54 | 714 |
| 875806 | N/A | N/A | 132608 | 132627 | GTTCAGGACATCTAAACTTA | 61 | 715 |
| 875830 | N/A | N/A | 134620 | 134639 | AAGGCTTTGAAAGTCTAATA | 46 | 716 |
| 875854 | N/A | N/A | 137343 | 137362 | ATACCAAGCTTGTGGCTTGG | 128 | 717 |
| | | | 137421 | 137440 | | | |
| 875878 | N/A | N/A | 139233 | 139252 | ATGCACAAGTCATAAGAGAT | 90 | 718 |
| 875902 | N/A | N/A | 142200 | 142219 | TTGTTTAATTTTTGACAGAG | 67 | 719 |
| 875926 | N/A | N/A | 143901 | 143920 | TGGAGCAATGTCCTGAGGGC | 66 | 720 |
| 875950 | N/A | N/A | 145923 | 145942 | ATATAGACATAGCAAAGCAG | 107 | 721 |
| 875974 | N/A | N/A | 147433 | 147452 | ATGCTTCAGAATCAGGCTGC | 64 | 722 |

TABLE 11
Percent control of human ATXN2 RNA with 5-10-5 MOE gapmers
with mixed internucleoside linkages

| | SEQ ID | SEQ ID | SEQ ID | SEQ ID | | | |
|---|---|---|---|---|---|---|---|
| | NO: 1 | NO: 1 | NO: 2 | NO: 2 | | | |
| Compound | Start | Stop | Start | Stop | | ATXN2 % | SEQ |
| Number | Site | Site | Site | Site | Sequence (5′ to 3′) | control | ID NO |
| 708199 | 1477 | 1496 | 81637 | 81656 | GCTAACTGGTTTGCCCTTGC | 32 | 32 |
| 874157 | 89 | 108 | 2079 | 2098 | CTTTACCGGAAGTCGGAGGG | 121 | 723 |
| 874181 | 261 | 280 | 2251 | 2270 | GCCCGCTCCGCCGCGCCGGC | 115 | 724 |
| 874205 | 572 | 591 | 2562 | 2581 | CGGGCGCGCCAAGGAGACGC | 95 | 725 |
| 874227 | 1417 | 1436 | N/A | N/A | GGCACTGTATACGAAGATAA | 67 | 726 |
| 874250 | 1648 | 1667 | 83259 | 83278 | TCTCTATTTCTTTGTCCAGG | 20 | 727 |
| 874274 | 2362 | 2381 | 91246 | 91265 | ACAGCTCTGTTCGATGCAGG | 37 | 728 |
| 874298 | 2676 | 2695 | 112985 | 113004 | TGAAAGAATCCTTAGCACTT | 51 | 729 |
| 874322 | 3131 | 3150 | 116367 | 116386 | TGTCTTGGCTTGATTCACTG | 72 | 730 |
| 874344 | 4142 | 4161 | 148893 | 148912 | GGTAGAAGCAGTAGAAGGGA | 45 | 731 |
| 874368 | 4287 | 4306 | 149038 | 149057 | CCCCAAGTTCCTAAATGCCT | 69 | 732 |
| 874392 | 4450 | 4469 | 149201 | 149220 | TTTTAGCAGTAATAGCAGCA | 65 | 733 |
| 874415 | 4618 | 4637 | 149369 | 149388 | AGTAAAAGTTTTTCCCTTAA | 35 | 734 |
| 874439 | N/A | N/A | 146578 | 146597 | CAACTGAGTCGCATCTCTAG | 88 | 735 |
| 874463 | N/A | N/A | 3480 | 3499 | AGGCCCACTTGTCTCCACCC | 109 | 736 |
| 874487 | N/A | N/A | 3719 | 3738 | GCGCCTTCTCCACTGCGGCC | 138 | 737 |
| 874511 | N/A | N/A | 5358 | 5377 | TTATCTTTCCTAAAACAGCC | 62 | 738 |
| 874535 | N/A | N/A | 7849 | 7868 | AATGTCAATTAACTTTTTTG | 72 | 739 |
| 874559 | N/A | N/A | 10080 | 10099 | GACAGGAGAAATGCTTGGCC | 134 | 740 |
| 874583 | N/A | N/A | 13962 | 13981 | CATTGGCAACACTGTTCAAT | 66 | 741 |
| 874607 | N/A | N/A | 16692 | 16711 | AACAATTATTTCAATAATGC | 129 | 742 |
| 874631 | N/A | N/A | 19028 | 19047 | CATAAAAACAGAAAATATTA | 86 | 743 |
| 874655 | N/A | N/A | 21122 | 21141 | AAGATGACAACGGAACGGGA | 58 | 744 |
| 874679 | N/A | N/A | 25252 | 25271 | CTGCACGCCACTGTACTCCA | 59 | 745 |
| 874703 | N/A | N/A | 28507 | 28526 | CTGACAATAATCACCGGATT | 32 | 746 |
| 874727 | N/A | N/A | 30982 | 31001 | CCATCTCAACTCTCATTATT | 74 | 747 |
| 874751 | N/A | N/A | 32580 | 32599 | GCCAGATTAATCCGGTCATA | 73 | 748 |
| 874775 | N/A | N/A | 35179 | 35198 | ATTCTGTAAGGCTACTACTG | 60 | 749 |
| 874799 | N/A | N/A | 37218 | 37237 | TGATTTTTATGTTCCTCAAG | 35 | 750 |
| 874823 | N/A | N/A | 38567 | 38586 | ATCTGAATCTAATCATAAGG | 142 | 751 |
| 874847 | N/A | N/A | 41643 | 41662 | GGCCAGAACTAGGGAAAGAG | 69 | 752 |
| 874871 | N/A | N/A | 43726 | 43745 | CACGAACTGTCCTTAAACTC | 64 | 753 |
| 874895 | N/A | N/A | 44805 | 44824 | TCATATGATTACAACTGCAG | 74 | 754 |
| 874919 | N/A | N/A | 46547 | 46566 | TAACATTCCAAAATTTAAGA | 76 | 755 |
| 874943 | N/A | N/A | 48522 | 48541 | ACAATACACTGAACTCTTGA | 69 | 756 |
| 874967 | N/A | N/A | 50878 | 50897 | AATACCCAGTACTGTTAGCC | 81 | 757 |
| 874991 | N/A | N/A | 53104 | 53123 | TGAAATCAATTCATATCTTT | 91 | 758 |
| 875015 | N/A | N/A | 55614 | 55633 | ATGGAGATCTTTTCCATTAA | 88 | 759 |
| 875039 | N/A | N/A | 58233 | 58252 | TACTAAAATCTACACAATTC | 128 | 760 |
| 875063 | N/A | N/A | 60587 | 60606 | AGTCATGCTTATAAAGTCCT | 30 | 761 |
| 875087 | N/A | N/A | 62947 | 62966 | ACTTAAAATTTGAACTGAAA | 119 | 762 |
| 875111 | N/A | N/A | 64571 | 64590 | ACCCGGCCCACACAAAAACT | 96 | 763 |
| 875135 | N/A | N/A | 68028 | 68047 | GGTTCAAGCAAATTGCTTGT | 77 | 764 |
| 875159 | N/A | N/A | 69889 | 69908 | GTATGATGACAAAAGAGGAC | 86 | 765 |
| 875183 | N/A | N/A | 71861 | 71880 | TTTTAAAGGGCCAGAATAAT | 100 | 766 |
| 875207 | N/A | N/A | 73177 | 73196 | CTGACCAGAATTTAGGTTGT | 146 | 767 |
| 875231 | N/A | N/A | 75227 | 75246 | TTTGAGATGGAGCTTGCTCT | 117 | 768 |
| 875255 | N/A | N/A | 77500 | 77519 | CATTATATTAGGTTATATAT | 137 | 769 |
| 875279 | N/A | N/A | 80036 | 80055 | AAATGGTTTTACCATTAGCA | 80 | 770 |
| 875303 | N/A | N/A | 81936 | 81955 | TTTCCAAGATCACCATAACC | 76 | 771 |
| 875327 | N/A | N/A | 83758 | 83777 | TATGTCTAAAAAATTTTATT | 87 | 772 |
| 875351 | N/A | N/A | 85054 | 85073 | AGGGTTAATTAGGATCTATA | 27 | 773 |
| 875375 | N/A | N/A | 86537 | 86556 | AACTTGCTCTTCAAGGTTAG | 79 | 774 |
| 875399 | N/A | N/A | 89386 | 89405 | TTTTAAAGGTTCTCTGGACT | 56 | 775 |
| 875423 | N/A | N/A | 92208 | 92227 | TATGGTTTGATGTTTCTGAC | 38 | 776 |
| 875447 | N/A | N/A | 95006 | 95025 | CCCTCCCCCTCCTTCTCCTT | 110 | 777 |
| 875471 | N/A | N/A | 96438 | 96457 | AAAGAAAAAAAAAGTTGCTC | 90 | 778 |
| 875495 | N/A | N/A | 98289 | 98308 | TTAACTTCTCTTTGCCCAAG | 82 | 779 |
| 875519 | N/A | N/A | 100293 | 100312 | AGTACAAGCAACAAAAACAG | 95 | 780 |
| 875543 | N/A | N/A | 102900 | 102919 | AAAGAGCAAAAGCCATACTG | 93 | 781 |
| 875567 | N/A | N/A | 106296 | 106315 | ACACACTTTACCTATAAAAT | 96 | 782 |
| 875591 | N/A | N/A | 109890 | 109909 | TGTGCCAGCTTCAGATATGA | 72 | 783 |
| 875615 | N/A | N/A | 112404 | 112423 | AATAGTCTAAGTAAAAGGAA | 106 | 784 |
| 875639 | N/A | N/A | 114281 | 114300 | CTGGCCAATCAACAAACACT | 76 | 785 |
| 875663 | N/A | N/A | 116247 | 116266 | GTTTTATATTGCTAGAGAGC | 65 | 786 |
| 875687 | N/A | N/A | 119697 | 119716 | TGCTCCCAGCCTCATATGAA | 109 | 787 |
| 875711 | N/A | N/A | 122603 | 122622 | TTAAAAAAATGAAATATGCA | 83 | 788 |
| 875735 | N/A | N/A | 125807 | 125826 | CAGAAACAAATTCAACCACA | 76 | 789 |
| 875759 | N/A | N/A | 129144 | 129163 | AAAAGAACCTACCTAAGGCA | 121 | 790 |
| 875783* | N/A | N/A | 131147 | 131166 | TATTAAAAGTTTTTTTATAT | 93 | 791 |
| 875807 | N/A | N/A | 132969 | 132988 | CCAGAAATCTGTAAATTCTT | 33 | 792 |
| 875831 | N/A | N/A | 134653 | 134672 | TGTACTTCAAATTTTGTTTA | 28 | 793 |
| 875855 | N/A | N/A | 137344 | 137363 | TATACCAAGCTTGTGGCTTG | 146 | 794 |
| | | | 137422 | 137441 | | | |
| 875879 | N/A | N/A | 139271 | 139290 | GTTTAATTTGTAACTAGGTT | 22 | 795 |
| 875903 | N/A | N/A | 142210 | 142229 | ATGTATTTATTTGTTTAATT | 95 | 796 |
| 875927 | N/A | N/A | 143971 | 143990 | CAAGTGCATTTTAGGTGCAC | 92 | 797 |
| 875951 | N/A | N/A | 145925 | 145944 | CTATATAGACATAGCAAAGC | 80 | 798 |
| 875975 | N/A | N/A | 147453 | 147472 | ATATCATACAAGATTCAATG | 86 | 799 |

TABLE 12
Percent control of human ATXN2 RNA with 5-10-5 MOE gapmers
with mixed internucleoside linkages

| | SEQ ID | SEQ ID | SEQ ID | SEQ ID | | | |
|---|---|---|---|---|---|---|---|
| | NO: 1 | NO: 1 | NO: 2 | NO: 2 | | ATXN2 | |
| Compound | Start | Stop | Start | Stop | | (% | SEQ |
| Number | Site | Site | Site | Site | Sequence (5′ to 3′) | control) | ID NO |
| 708199 | 1477 | 1496 | 81637 | 81656 | GCTAACTGGTTTGCCCTTGC | 41 | 32 |
| 874158 | 94 | 113 | 2084 | 2103 | GGACTCTTTACCGGAAGTCG | 92 | 800 |
| 874182 | 266 | 285 | 2256 | 2275 | GCCCCGCCCGCTCCGCCGCG | 55 | 801 |
| 874206 | 577 | 596 | 2567 | 2586 | GGAGCCGGGCGCGCCAAGGA | 114 | 802 |
| 874228 | 1467 | 1486 | 81627 | 81646 | TTGCCCTTGCTTCCCGTTTT | 48 | 803 |
| 874251 | 1649 | 1668 | 83260 | 83279 | TTCTCTATTTCTTTGTCCAG | 39 | 804 |
| 874275 | 2364 | 2383 | 91248 | 91267 | TAACAGCTCTGTTCGATGCA | 53 | 805 |
| 874299 | 2678 | 2697 | 112987 | 113006 | AATGAAAGAATCCTTAGCAC | 65 | 806 |
| 874323 | 3133 | 3152 | 116369 | 116388 | TATGTCTTGGCTTGATTCAC | 73 | 807 |
| 874345 | 4147 | 4166 | 148898 | 148917 | CAGTTGGTAGAAGCAGTAGA | 53 | 808 |
| 874369 | 4292 | 4311 | 149043 | 149062 | ATAGCCCCCAAGTTCCTAAA | 45 | 809 |
| 874393 | 4455 | 4474 | 149206 | 149225 | TTTTTTTTTAGCAGTAATAG | 118 | 810 |
| 874416 | 4623 | 4642 | 149374 | 149393 | TACAAAGTAAAAGTTTTTCC | 132 | 811 |
| 874440 | N/A | N/A | 146583 | 146602 | AGATCCAACTGAGTCGCATC | 62 | 812 |
| 874464 | N/A | N/A | 3512 | 3531 | TCGGACACGAACGCAGAGGG | 46 | 813 |
| 874488 | N/A | N/A | 5403 | 5422 | TTCGACCTCGATGTTCCACA | 85 | 814 |
| 874512 | N/A | N/A | 7908 | 7927 | CAAAATTAGATTACAGTAAA | 96 | 815 |
| 874536 | N/A | N/A | 10350 | 10369 | AACAAAACATGTCTCTTTGG | 100 | 816 |
| 874560 | N/A | N/A | 13986 | 14005 | CAGCATGATCTTGTGTATAT | 23 | 817 |
| 874584 | N/A | N/A | 16725 | 16744 | AAGGAAATTTAAAAAAAAAC | 93 | 818 |
| 874608 | N/A | N/A | 19049 | 19068 | CCTCGGCAACTAAGAGCGAA | 125 | 819 |
| 874632 | N/A | N/A | 21273 | 21292 | TCCCATCTCAAAAAATAAAT | 118 | 820 |
| 874656 | N/A | N/A | 25454 | 25473 | AGGTACTCAGCAAGCTGAGG | 93 | 821 |
| 874680 | N/A | N/A | 28537 | 28556 | GCCACTTTGGAAGGTCGAGG | 63 | 822 |
| 874704 | N/A | N/A | 31297 | 31316 | AAAGCATGGTTGATTGAAGA | 48 | 823 |
| 874728 | N/A | N/A | 32795 | 32814 | CTAAAGCTGAGTGACAGGTA | 46 | 824 |
| 874752 | N/A | N/A | 35188 | 35207 | CTTGTTGTTGTTTACATTAT | 23 | 825 |
| 874776 | N/A | N/A | 37309 | 37328 | AAGAAATACATTCTGTAAGG | 64 | 826 |
| 874800 | N/A | N/A | 38708 | 38727 | AAACTTTCCATTTCAAAGCT | 88 | 827 |
| 874824 | N/A | N/A | 41669 | 41688 | AACTTAGTAGACACAACTCT | 104 | 828 |
| 874848 | N/A | N/A | 43780 | 43799 | GCTAAATTGTAGTTGTCTAG | 57 | 829 |
| 874872 | N/A | N/A | 44818 | 44837 | TCTGGTATCCTGGTGGCTGC | 85 | 830 |
| 874896 | N/A | N/A | 45132 | 45151 | AAAGAAAAACAGGTCATATG | 68 | 831 |
| 874920 | N/A | N/A | 46580 | 46599 | TTCTGCCCTTCATGTCCGGT | 80 | 832 |
| 874944 | N/A | N/A | 48569 | 48588 | ATATTAGGTATTCACTAACA | 66 | 833 |
| 874968 | N/A | N/A | 50978 | 50997 | GGCCTCTTAAGACAAAAAGT | 83 | 834 |
| 874992 | N/A | N/A | 53114 | 53133 | AGCTCAGAAATGAAATCAAT | 71 | 835 |
| 875016 | N/A | N/A | 55889 | 55908 | ACCAGCCTGTGCAATACAGG | 120 | 836 |
| 875040 | N/A | N/A | 58283 | 58302 | TATTTCTCACTGTTCTCTAA | 135 | 837 |
| 875064 | N/A | N/A | 60616 | 60635 | CTTTTACTTCATGATTTTTT | 67 | 838 |
| 875088 | N/A | N/A | 62995 | 63014 | AGTAATTTTATGTTTTTAAA | 101 | 839 |
| 875112 | N/A | N/A | 64881 | 64900 | TCCACACGCAGTTTTTTTTT | 77 | 840 |
| 875136 | N/A | N/A | 68147 | 68166 | TTTCCCATATAATTTTTTTT | 105 | 841 |
| 875160 | N/A | N/A | 69928 | 69947 | CAGGTGGAGCCACGCTCCTC | 95 | 842 |
| 875184 | N/A | N/A | 71978 | 71997 | GGGTATCCCCAGCCCCATAC | 98 | 843 |
| 875208 | N/A | N/A | 73487 | 73506 | TAGAAGCTCAGTATTAAAAA | 72 | 844 |
| 875232 | N/A | N/A | 75614 | 75633 | GTAATTACTCTGCATGTCTC | 60 | 845 |
| 875256 | N/A | N/A | 77522 | 77541 | CGTGATGTACAGACTTGAGA | 50 | 846 |
| 875280 | N/A | N/A | 80042 | 80061 | CTTTAGAAATGGTTTTACCA | 139 | 847 |
| 875304 | N/A | N/A | 82011 | 82030 | GCTCTTCAAGATCTTGGATT | 57 | 848 |
| 875328 | N/A | N/A | 83789 | 83808 | TTGCACATAGGTTAGAATTT | 10 | 849 |
| 875352 | N/A | N/A | 85056 | 85075 | AAAGGGTTAATTAGGATCTA | 43 | 850 |
| 875376 | N/A | N/A | 86832 | 86851 | TCTTTAGAAGAATGCTAATG | 82 | 851 |
| 875400 | N/A | N/A | 89401 | 89420 | GGCCGATCTTGTTTCTTTTA | 107 | 852 |
| 875424 | N/A | N/A | 92295 | 92314 | TATTGTTGTTACCAAATCTC | 63 | 853 |
| 875448 | N/A | N/A | 95058 | 95077 | GGAAGAATACCTACAGCAAG | 75 | 854 |
| 875472 | N/A | N/A | 96869 | 96888 | CTGAGCACCAAGTCACTCTC | 118 | 855 |
| 875496 | N/A | N/A | 98388 | 98407 | TGCACTATGCATTAGTTACT | 73 | 856 |
| 875520 | N/A | N/A | 100334 | 100353 | CAAAAGAAAGAAAACAGGAA | 77 | 857 |
| 875544 | N/A | N/A | 102911 | 102930 | CAAAAGGCCCAAAAGAGCAA | 70 | 858 |
| 875568 | N/A | N/A | 106734 | 106753 | TAACAAAATGGTAGTAGTTA | 144 | 859 |
| 875592 | N/A | N/A | 110018 | 110037 | CTAGACATATTCTGGACCAG | 68 | 860 |
| 875616 | N/A | N/A | 112411 | 112430 | GATGGAGAATAGTCTAAGTA | 76 | 861 |
| 875640 | N/A | N/A | 114357 | 114376 | TGGCCACGCTGACCTTAAGT | 88 | 862 |
| 875664 | N/A | N/A | 116254 | 116273 | ACTCTTAGTTTTATATTGCT | 66 | 863 |
| 875688 | N/A | N/A | 119897 | 119916 | GTTCAAGCGATTCTGATGCT | 51 | 864 |
| 875712 | N/A | N/A | 122950 | 122969 | CTTATTAATTGAAATATGTA | 144 | 865 |
| 875736 | N/A | N/A | 125972 | 125991 | GTTGGTTTTAAAAAGGCAAC | 86 | 866 |
| 875760 | N/A | N/A | 129173 | 129192 | GAGAAGTCCCTGGGTTACAC | 47 | 867 |
| 875784* | N/A | N/A | 131173 | 131192 | AATTATAAAGGAAAATCCCT | 102 | 868 |
| 875808 | N/A | N/A | 133004 | 133023 | TATGAAAAGTAGTAATGTCT | 60 | 869 |
| 875832 | N/A | N/A | 134730 | 134749 | TTATAAAATATAAATTGTTC | 120 | 870 |
| 875856 | N/A | N/A | 137345 | 137364 | TTATACCAAGCTTGTGGCTT | 89 | 871 |
| | | | 137423 | 137442 | | | |
| 875880 | N/A | N/A | 139284 | 139303 | CAGAAAGCTGTGTGTTTAAT | 39 | 872 |
| 875904 | N/A | N/A | 142258 | 142277 | CGAACCTGAGTTTGTTGTAC | 40 | 873 |
| 875928 | N/A | N/A | 144009 | 144028 | AAAAGGCAACTTGAAGGCAT | 73 | 874 |
| 875952 | N/A | N/A | 145950 | 145969 | TGTACACATATATATAGTAG | 65 | 875 |
| 875976 | N/A | N/A | 147460 | 147479 | CAACTTAATATCATACAAGA | 95 | 876 |

TABLE 13
Percent control of human ATXN2 RNA with 5-10-5 MOE gapmers
with mixed internucleoside linkages

| | SEQ ID | SEQ ID | SEQ ID | SEQ ID | | | |
|---|---|---|---|---|---|---|---|
| | NO: 1 | NO: 1 | NO: 2 | NO: 2 | | | |
| Compound | Start | Stop | Start | Stop | | ATXN2 % | SEQ |
| Number | Site | Site | Site | Site | Sequence (5′ to 3′) | control | ID NO |
| 708199 | 1477 | 1496 | 81637 | 81656 | GCTAACTGGTTTGCCCTTGC | 31 | 32 |
| 874159 | 99 | 118 | 2089 | 2108 | GATAGGGACTCTTTACCGGA | 109 | 877 |
| 874183 | 271 | 290 | 2261 | 2280 | CCGCCGCCCCGCCCGCTCCG | 118 | 878 |
| 874207 | 752 | 771 | 2742 | 2761 | GCCGCTGCCGCCGGGCTTGC | 157 | 879 |
| 874229 | 1469 | 1488 | 81629 | 81648 | GTTTGCCCTTGCTTCCCGTT | 30 | 880 |
| 874252 | 1650 | 1669 | 83261 | 83280 | CTTCTCTATTTCTTTGTCCA | 44 | 881 |
| 874276 | 2365 | 2384 | 91249 | 91268 | GTAACAGCTCTGTTCGATGC | 34 | 882 |
| 874300 | 2758 | 2777 | 113067 | 113086 | GTGTTACTAAGTATTGAAGG | 32 | 883 |
| 874324* | 3388 | 3407 | 131469 | 131488 | TGTGTTGGTGGTGCCATCAT | 254 | 884 |
| 874346 | 4152 | 4171 | 148903 | 148922 | GCTTCCAGTTGGTAGAAGCA | 115 | 885 |
| 874370 | 4297 | 4316 | 149048 | 149067 | ATGGAATAGCCCCCAAGTTC | 57 | 886 |
| 874394 | 4476 | 4495 | 149227 | 149246 | AAGTCTTGATTTTTTTTTTT | 106 | 887 |
| 874417 | 4628 | 4647 | 149379 | 149398 | TTATCTACAAAGTAAAAGTT | 77 | 888 |
| 874441 | N/A | N/A | 146588 | 146607 | GAGATAGATCCAACTGAGTC | 60 | 889 |
| 874465 | N/A | N/A | 3517 | 3536 | CCGCCTCGGACACGAACGCA | 81 | 890 |
| 874489 | N/A | N/A | N/A | N/A | ACTGTTTCGACCTCGATGTT | 121 | 891 |
| 874513 | N/A | N/A | 5527 | 5546 | ATGAACCCAGGAGACAGAGA | 62 | 892 |
| 874537 | N/A | N/A | 7982 | 8001 | AAAAAGTTTATTTTCTCCAC | 53 | 893 |
| 874561 | N/A | N/A | 10665 | 10684 | GGTTTCATGCCATTCTCTTG | 66 | 894 |
| 874585 | N/A | N/A | 14245 | 14264 | TAATTAAAGCACTTTGGGAA | 71 | 895 |
| 874609 | N/A | N/A | 17106 | 17125 | ATTCTTGGCAGCTGGGTGCA | 60 | 896 |
| 874633 | N/A | N/A | 19342 | 19361 | ATGATGGCACACACATGTGG | 74 | 897 |
| 874657 | N/A | N/A | 21336 | 21355 | CTCCGAAAAATTAAAAATAA | 82 | 898 |
| 874681 | N/A | N/A | 25995 | 26014 | TTATTCACTACTGTATTCCC | 51 | 899 |
| 874705 | N/A | N/A | 28864 | 28883 | CCAGACTTTGCAGCCTACCA | 65 | 900 |
| 874729 | N/A | N/A | 31541 | 31560 | TTCCCATCTTCTCGAGTTCT | 78 | 901 |
| 874753 | N/A | N/A | 32803 | 32822 | TCAGACTTCTTGTTGTTGTT | 19 | 902 |
| 874777 | N/A | N/A | 35267 | 35286 | GAGATAGCATGCCACTGCAC | 51 | 903 |
| 874801 | N/A | N/A | 37352 | 37371 | AACAGCCCAATCAGAACAAG | 58 | 904 |
| 874825 | N/A | N/A | 38727 | 38746 | AATAACTTTATAGTGAAGAA | 71 | 905 |
| 874849 | N/A | N/A | 41776 | 41795 | AAAAACTCACAATCTCTTCC | 68 | 906 |
| 874873 | N/A | N/A | 43784 | 43803 | ATGATCTGGTATCCTGGTGG | 39 | 907 |
| 874897 | N/A | N/A | 45158 | 45177 | CTTCCCATATTTCTCCCCCA | 77 | 908 |
| 874921 | N/A | N/A | 46603 | 46622 | TTCCATCATGTGGGACTTAT | 51 | 909 |
| 874945 | N/A | N/A | 48588 | 48607 | CCTCATCAGGCTTCATTCAA | 72 | 910 |
| 874969 | N/A | N/A | 51035 | 51054 | ATCAACTCCAAAGGTAGCAG | 26 | 911 |
| 874993 | N/A | N/A | 53450 | 53469 | AACAAACAAACATTAATTCG | 85 | 912 |
| 875017 | N/A | N/A | 56035 | 56054 | AGTCAAGGGCATGATTGAAG | 63 | 913 |
| 875041 | N/A | N/A | 58308 | 58327 | CAGAATAAAACAATCTGTAG | 97 | 914 |
| 875065 | N/A | N/A | 60652 | 60671 | TAAATCTTTAATCTCTTTAT | 60 | 915 |
| 875089 | N/A | N/A | 63006 | 63025 | TGTACCCAGCCAGTAATTTT | 67 | 916 |
| 875113 | N/A | N/A | 65073 | 65092 | AAATCAGCCTGTGCAACAGT | 106 | 917 |
| 875137 | N/A | N/A | 68347 | 68366 | CCCTAGGGATACCAAAATCC | 111 | 918 |
| 875161 | N/A | N/A | 69938 | 69957 | ACCAAGGGCACAGGTGGAGC | 73 | 919 |
| 875185 | N/A | N/A | 72025 | 72044 | GCTGGTGGTCATAAAGAAAT | 128 | 920 |
| 875209 | N/A | N/A | 73728 | 73747 | TTTCAAGAATGTAAAATGTT | 92 | 921 |
| 875233 | N/A | N/A | 75640 | 75659 | ACATAATTCATTAAATTATA | 122 | 922 |
| 875257 | N/A | N/A | 77573 | 77592 | ACCAATAGTGTAAAAGAAGT | 104 | 923 |
| 875281 | N/A | N/A | 80384 | 80403 | CTGTAAAAGCCACCTTTCAG | 103 | 924 |
| 875305 | N/A | N/A | 82014 | 82033 | CAAGCTCTTCAAGATCTTGG | 90 | 925 |
| 875329 | N/A | N/A | 83868 | 83887 | TAAGTTACCTCAGATCCTTT | 52 | 926 |
| 875353 | N/A | N/A | 85058 | 85077 | CCAAAGGGTTAATTAGGATC | 52 | 927 |
| 875377 | N/A | N/A | 86878 | 86897 | TAGCCACCATGCCTGGCTTC | 98 | 928 |
| 875401 | N/A | N/A | 89788 | 89807 | CAATTACATGAATGTGCATC | 36 | 929 |
| 875425 | N/A | N/A | 92341 | 92360 | ATGGTGGTTTCAAATGTCAG | 39 | 930 |
| 875449 | N/A | N/A | 95227 | 95246 | TATATATGTAAATTATATCT | 128 | 931 |
| | | | 95287 | 95306 | | | |
| 875473 | N/A | N/A | 96913 | 96932 | TTGAACCCCACCTTATGCTA | 60 | 932 |
| 875497 | N/A | N/A | 98445 | 98464 | GGGCTATGAGCATGTCATGA | 71 | 933 |
| 875521 | N/A | N/A | 100335 | 100354 | ACAAAAGAAAGAAAACAGGA | 135 | 934 |
| 875545 | N/A | N/A | 103117 | 103136 | TATAATGACAACTTTAAAAC | 106 | 935 |
| 875569 | N/A | N/A | 106756 | 106775 | TACAAAACAACCAGATAATA | 86 | 936 |
| 875593 | N/A | N/A | 110045 | 110064 | CTAGGCCATAGCTCCCAGAT | 99 | 937 |
| 875617 | N/A | N/A | 112430 | 112449 | AGTTTAGGAAAGGTGTTGGG | 128 | 938 |
| 875641 | N/A | N/A | 114754 | 114773 | CAATTTAAAAAAAATTGCTA | 111 | 939 |
| 875665 | N/A | N/A | 116291 | 116310 | ACATTAGGCACCTATGATAA | 74 | 940 |
| 875689 | N/A | N/A | 119970 | 119989 | TTGAGACTCACTCTTTCACT | 71 | 941 |
| 875713 | N/A | N/A | 123039 | 123058 | GGCAAGGATGCAGAACACAT | 46 | 942 |
| 875737 | N/A | N/A | 125996 | 126015 | AGCCAAGATATATTTTAAAG | 84 | 943 |
| 875761 | N/A | N/A | 129221 | 129240 | CTTCATATATGGTACTTCAT | 46 | 944 |
| 875785* | N/A | N/A | 131273 | 131292 | TTTCCTCTGAACCTCTTACA | 77 | 945 |
| 875809 | N/A | N/A | 133039 | 133058 | TTAAAACTTTTATTCTTCAA | 87 | 946 |
| 875833 | N/A | N/A | 134752 | 134771 | TATTACAATATATTTAATAT | 79 | 947 |
| 875857 | N/A | N/A | 137346 | 137365 | TTTATACCAAGCTTGTGGCT | 98 | 948 |
| | | | 137424 | 137443 | | | |
| 875881 | N/A | N/A | 139301 | 139320 | CTGAAGCAAATTAAGTACAG | 65 | 949 |
| 875905 | N/A | N/A | 142335 | 142354 | CATACTCATTAAGTTTACTT | 60 | 950 |
| 875929 | N/A | N/A | 144073 | 144092 | TCTACATATGATATTAAAAT | 97 | 951 |
| 875953 | N/A | N/A | 146067 | 146086 | ACTCATGTGAGTAACAATCA | 65 | 952 |
| 875977 | N/A | N/A | 147547 | 147566 | TAACCCTTGACATTTCTGAT | 65 | 953 |

TABLE 14
Percent control of human ATXN2 RNA with 5-10-5 MOE gapmers
with mixed internucleoside linkages

| | SEQ ID | SEQ ID | SEQ ID | SEQ ID | | | |
|---|---|---|---|---|---|---|---|
| | NO: 1 | NO: 1 | NO: 2 | NO: 2 | | | |
| Compound | Start | Stop | Start | Stop | | ATXN2 % | SEQ |
| Number | Site | Site | Site | Site | Sequence (5′ to 3′) | control | ID NO |
| 708199 | 1477 | 1496 | 81637 | 81656 | GCTAACTGGTTTGCCCTTGC | 45 | 32 |
| 708399 | 3483 | 3502 | 136956 | 136975 | TGTTGTATGGTAATTTGGGA | 29 | 954 |
| 874160 | 104 | 123 | 2094 | 2113 | GTGCGGATAGGGACTCTTTA | 98 | 955 |
| 874184 | 276 | 295 | 2266 | 2285 | CGCCACCGCCGCCCCGCCCG | 120 | 956 |
| 874208 | 987 | 1006 | N/A | N/A | CTTCACATTTGGAGCCAACA | 62 | 957 |
| 874230 | 1470 | 1489 | 81630 | 81649 | GGTTTGCCCTTGCTTCCCGT | 72 | 958 |
| 874253 | 1652 | 1671 | 83263 | 83282 | GACTTCTCTATTTCTTTGTC | 62 | 959 |
| 874277 | 2366 | 2385 | 91250 | 91269 | GGTAACAGCTCTGTTCGATG | 36 | 960 |
| 874301 | 2760 | 2779 | 113069 | 113088 | CCGTGTTACTAAGTATTGAA | 48 | 961 |
| 874347 | 4157 | 4176 | 148908 | 148927 | TCTGTGCTTCCAGTTGGTAG | 61 | 962 |
| 874371 | 4311 | 4330 | 149062 | 149081 | CAGCATATGGAATTATGGAA | 44 | 963 |
| 874395 | 4481 | 4500 | 149232 | 149251 | GTTCCAAGTCTTGATTTTTT | 50 | 964 |
| 874418 | 4633 | 4652 | 149384 | 149403 | TTATATTATCTACAAAGTAA | 76 | 965 |
| 874442 | N/A | N/A | 146593 | 146612 | TCTGAGAGATAGATCCAACT | 62 | 966 |
| 874466 | N/A | N/A | 3522 | 3541 | CGCCGCCGCCTCGGACACGA | 79 | 967 |
| 874490 | N/A | N/A | 2936 | 2955 | GGACGGCGGCGCGGGCCGCG | 96 | 968 |
| 874514 | N/A | N/A | 5531 | 5550 | TTAAATGAACCCAGGAGACA | 106 | 969 |
| 874538 | N/A | N/A | 7992 | 8011 | GCCCAAACTTAAAAAGTTTA | 84 | 970 |
| 874562 | N/A | N/A | 10678 | 10697 | GCTCTGCCTCCCGGGTTTCA | 71 | 971 |
| 874586 | N/A | N/A | 14320 | 14339 | CATGACTTTAAAAAGCAATA | 59 | 972 |
| 874610 | N/A | N/A | 17158 | 17177 | TTTGAATTACAATGCGGTAT | 19 | 973 |
| 874634 | N/A | N/A | 19549 | 19568 | CAAGGCAAGAGGAGTACTTG | 87 | 974 |
| 874658 | N/A | N/A | 21350 | 21369 | GAGCAAGATCCTATCTCCGA | 67 | 975 |
| 874682 | N/A | N/A | 26160 | 26179 | TGTTTTCCTCTTCATCTAAA | 35 | 976 |
| 874706 | N/A | N/A | 28889 | 28908 | AGTCTTGTTCAGTGTCCTTC | 19 | 977 |
| 874730 | N/A | N/A | 31622 | 31641 | GAAATATTTAAATTTTAATC | 100 | 978 |
| 874754 | N/A | N/A | 32817 | 32836 | TTGTTCTTCCAATTTCAGAC | 12 | 979 |
| 874778 | N/A | N/A | 35640 | 35659 | AAAATTACTTCTCATTGACA | 67 | 980 |
| 874802 | N/A | N/A | 37398 | 37417 | GAATCATGCCTCATATGATA | 127 | 981 |
| 874826 | N/A | N/A | 38826 | 38845 | TCCACAGAAGCTAAATATAG | 113 | 982 |
| 874850 | N/A | N/A | 41826 | 41845 | AAATTGTTAAAATGGTATAT | 118 | 983 |
| 874874 | N/A | N/A | 43788 | 43807 | AACGATGATCTGGTATCCTG | 25 | 984 |
| 874898 | N/A | N/A | 45195 | 45214 | CTTGATTTAACCAACACAGA | 77 | 985 |
| 874922 | N/A | N/A | 46632 | 46651 | AAAATTTGTGATAGCTTCTC | 45 | 986 |
| 874946 | N/A | N/A | 48678 | 48697 | TTGGAGCCCTAAAAACATAT | 106 | 987 |
| 874970 | N/A | N/A | 51088 | 51107 | AATATTTCAATAGTATAAGT | 94 | 988 |
| 874994 | N/A | N/A | 53501 | 53520 | CACGCCACTGTACCCAGCCT | 107 | 989 |
| 875018 | N/A | N/A | 56070 | 56089 | GAAAAAGAGAACAAGGAGGT | 86 | 990 |
| 875042 | N/A | N/A | 58395 | 58414 | GAAGAGATCCCTGTTTGTTA | 78 | 991 |
| 875066 | N/A | N/A | 61057 | 61076 | CCACCTTTTCATACATTCAC | 71 | 992 |
| 875090 | N/A | N/A | 63149 | 63168 | TACCACCGTGTCTGGCTACT | 135 | 993 |
| 875114 | N/A | N/A | 65095 | 65114 | TGATACAGCCACTATGCCCA | 64 | 994 |
| 875138 | N/A | N/A | 68412 | 68431 | AATAAATTATTCCAACACAC | 88 | 995 |
| 875162 | N/A | N/A | 70035 | 70054 | ATATTAAAGACTATAATACT | 89 | 996 |
| 875186 | N/A | N/A | 72033 | 72052 | TGCCACCTGCTGGTGGTCAT | 95 | 997 |
| 875210 | N/A | N/A | 73774 | 73793 | TAAAGTTATGTGGATTGCTG | 82 | 998 |
| 875234 | N/A | N/A | 76018 | 76037 | CAGATGACTATCAGTAAAGG | 65 | 999 |
| 875258 | N/A | N/A | 77592 | 77611 | CTATCAATTTATCCACCTCA | 84 | 1000 |
| 875282 | N/A | N/A | 80426 | 80445 | CATAAAATAGCCTTCAGATC | 83 | 1001 |
| 875306 | N/A | N/A | 82128 | 82147 | CTAGCTCCTCCTCATTCTGT | 59 | 1002 |
| 875330 | N/A | N/A | 83955 | 83974 | CCTTAGACTAAGGGTTGTTT | 75 | 1003 |
| 875354 | N/A | N/A | 85060 | 85079 | TCCCAAAGGGTTAATTAGGA | 52 | 1004 |
| 875378 | N/A | N/A | 87195 | 87214 | TCCTCACTCTCTCACCCGGC | 116 | 1005 |
| 875402 | N/A | N/A | 90101 | 90120 | CCTCCCGGGTCCTGGTTCAA | 68 | 1006 |
| 875426 | N/A | N/A | 92344 | 92363 | GCTATGGTGGTTTCAAATGT | 42 | 1007 |
| 875450 | N/A | N/A | 95228 | 95247 | TTATATATGTAAATTATATC | 103 | 1008 |
| | | | 95288 | 95307 | | | |
| 875474 | N/A | N/A | 96950 | 96969 | GTCAATTAGAAATAAAAAAT | 144 | 1009 |
| 875498 | N/A | N/A | 98617 | 98636 | CTAAAACCCACATTATTAAC | 87 | 1010 |
| 875522 | N/A | N/A | 100343 | 100362 | CATCCTCTACAAAAGAAAGA | 83 | 1011 |
| 875546 | N/A | N/A | 103265 | 103284 | TACAAAAATCAACACACAAA | 87 | 1012 |
| 875570 | N/A | N/A | 106843 | 106862 | AAAATCACTTTCAAAACAAG | 102 | 1013 |
| 875594 | N/A | N/A | 110104 | 110123 | TGGATACTAGTTCAGCCACA | 73 | 1014 |
| 875618 | N/A | N/A | 112541 | 112560 | TCAGACACTTCACAATAAAA | 96 | 1015 |
| 875642 | N/A | N/A | 114895 | 114914 | AAACCTACCTGAGAGAAGGA | 92 | 1016 |
| 875666 | N/A | N/A | 116299 | 116318 | AAAAATTAACATTAGGCACC | 108 | 1017 |
| 875690 | N/A | N/A | 120054 | 120073 | GTTTGGCAGTTCCATCACAG | 75 | 1018 |
| 875714 | N/A | N/A | 123199 | 123218 | TTACTAAAAAAAGGTTGACA | 101 | 1019 |
| 875738 | N/A | N/A | 126191 | 126210 | TTATTGTAAAAAGATTTATC | 95 | 1020 |
| 875762 | N/A | N/A | 129249 | 129268 | TAAAAACTAACATATAAACA | 94 | 1021 |
| 875786* | N/A | N/A | 131299 | 131318 | GTAAACTCTCAAATCTTTCT | 88 | 1022 |
| 875810 | N/A | N/A | 133116 | 133135 | GCATAAGCTGTGGGTTACAG | 41 | 1023 |
| 875834 | N/A | N/A | 134776 | 134795 | GTATTTGGTTCCTTTGAGAA | 33 | 1024 |
| 875858 | N/A | N/A | 137508 | 137527 | CTTAGTATTTCATCAATCCT | 41 | 1025 |
| 875882 | N/A | N/A | 139406 | 139425 | AGTGTTCCTTGACATAAATA | 56 | 1026 |
| 875906 | N/A | N/A | 142354 | 142373 | ACAGGCCCTCCATCATCATC | 71 | 1027 |
| 875930 | N/A | N/A | 144074 | 144093 | CTCTACATATGATATTAAAA | 89 | 1028 |
| 875954 | N/A | N/A | 146116 | 146135 | AGCAGATATATGGATAACCA | 29 | 1029 |
| 875978 | N/A | N/A | 147750 | 147769 | CATGTCAACTGTGTTCCTTT | 37 | 1030 |

TABLE 15
Percent control of human ATXN2 RNA with 5-10-5 MOE gapmers
with mixed internucleoside linkages

| | SEQ ID | SEQ ID | SEQ ID | SEQ ID | | | |
|---|---|---|---|---|---|---|---|
| | NO: 1 | NO: 1 | NO: 2 | NO: 2 | | | |
| Compound | Start | Stop | Start | Stop | | ATXN2 % | SEQ |
| Number | Site | Site | Site | Site | Sequence (5′ to 3′) | control | ID NO |
| 708199 | 1477 | 1496 | 81637 | 81656 | GCTAACTGGTTTGCCCTTGC | 48 | 32 |
| 708490 | 4500 | 4519 | 149251 | 149270 | TCAAGTTTAGTAAAAGGGCG | 74 | 1031 |
| 874161 | 109 | 128 | 2099 | 2118 | CGGAGGTGCGGATAGGGACT | 78 | 1032 |
| 874185 | 281 | 300 | 2271 | 2290 | GGCCGCGCCACCGCCGCCCC | 91 | 1033 |
| 874209 | 989 | 1008 | N/A | N/A | TACTTCACATTTGGAGCCAA | 60 | 1034 |
| 874231 | 1471 | 1490 | 81631 | 81650 | TGGTTTGCCCTTGCTTCCCG | 65 | 1035 |
| 874254 | 1654 | 1673 | 83265 | 83284 | ATGACTTCTCTATTTCTTTG | 35 | 1036 |
| 874278 | 2385 | 2404 | N/A | N/A | CTTTAGCCTCACTAGAAGGG | 73 | 1037 |
| 874302 | 2761 | 2780 | 113070 | 113089 | TCCGTGTTACTAAGTATTGA | 64 | 1038 |
| 874325 | 3485 | 3504 | 136958 | 136977 | CTTGTTGTATGGTAATTTGG | 40 | 1039 |
| 874348 | 4171 | 4190 | 148922 | 148941 | TGAAATTCTAGTTTTCTGTG | 44 | 1040 |
| 874372 | 4316 | 4335 | 149067 | 149086 | TGAAACAGCATATGGAATTA | 69 | 1041 |
| 874419 | 4638 | 4657 | 149389 | 149408 | TTATTTTATATTATCTACAA | 91 | 1042 |
| 874443 | N/A | N/A | 146598 | 146617 | AGCCTTCTGAGAGATAGATC | 73 | 1043 |
| 874467 | N/A | N/A | 3527 | 3546 | GCCCCCGCCGCCGCCTCGGA | 73 | 1044 |
| 874491 | N/A | N/A | 2984 | 3003 | CTGCCGGCCCCCAGCCCACC | 106 | 1045 |
| 874515 | N/A | N/A | 5633 | 5652 | TGGCAAAATCCCGTCCTCAC | 139 | 1046 |
| 874539 | N/A | N/A | 8091 | 8110 | CACTGTTTCAGAATGTGGAA | 125 | 1047 |
| 874563 | N/A | N/A | 10828 | 10847 | GCATATAGCAAGAGATGTAG | 89 | 1048 |
| 874587 | N/A | N/A | 14339 | 14358 | ATTATTAAGAATATTTTAAC | 141 | 1049 |
| 874611 | N/A | N/A | 17212 | 17231 | GCAGAGCAGGACTAGTCCAT | 91 | 1050 |
| 874635 | N/A | N/A | 19575 | 19594 | GCCTTAATTTCAATACTTTG | 65 | 1051 |
| 874659 | N/A | N/A | 21398 | 21417 | GCAAGAGTTTCACTTGAGCC | 112 | 1052 |
| 874683 | N/A | N/A | 26226 | 26245 | CCCATTTCAGCCTCCCCATG | 115 | 1053 |
| 874707 | N/A | N/A | 28898 | 28917 | TACTGCTGAAGTCTTGTTCA | 98 | 1054 |
| 874731 | N/A | N/A | 31654 | 31673 | ACTTGAAATACGATTAGTAT | 67 | 1055 |
| 874755 | N/A | N/A | 32836 | 32855 | CTCACTTAGGTGAGTCATTT | 87 | 1056 |
| 874779 | N/A | N/A | 35967 | 35986 | TGAGATATAACAATATTGAA | 84 | 1057 |
| 874803 | N/A | N/A | 37400 | 37419 | AGGAATCATGCCTCATATGA | 85 | 1058 |
| 874827 | N/A | N/A | 39445 | 39464 | GCAGAAGGACCACTTAAGAC | 78 | 1059 |
| 874851 | N/A | N/A | 42179 | 42198 | AATACATATAAAAGCAATGC | 57 | 1060 |
| 874875 | N/A | N/A | 43912 | 43931 | TACCTCGCCTAACAAAAATT | 103 | 1061 |
| 874899 | N/A | N/A | 45357 | 45376 | ACCAGAGTCCAGGAGTCTGA | 125 | 1062 |
| 874923 | N/A | N/A | 46639 | 46658 | AGTCTCAAAAATTTGTGATA | 82 | 1063 |
| 874947 | N/A | N/A | 48833 | 48852 | ATCATTCAAAGTGGCTTTAA | 41 | 1064 |
| 874971 | N/A | N/A | 51100 | 51119 | TTATAACAGAGGAATATTTC | 107 | 1065 |
| 874995 | N/A | N/A | 53763 | 53782 | ATCCTTTAACAACCATGGAA | 79 | 1066 |
| 875019 | N/A | N/A | 56364 | 56383 | GGTATAAAAGAGCAAGGAGA | 100 | 1067 |
| 875043 | N/A | N/A | 58428 | 58447 | CCGTAAACAGCTTTTCTAAT | 82 | 1068 |
| 875067 | N/A | N/A | 61071 | 61090 | ACAAGTGAGGAGGGCCACCT | 99 | 1069 |
| 875091 | N/A | N/A | 63212 | 63231 | ATCTCCCTGCGCTCAGATGA | 95 | 1070 |
| 875115 | N/A | N/A | 65108 | 65127 | TAGGATTGTAAAATGATACA | 61 | 1071 |
| | | | 65149 | 65168 | | | |
| 875139 | N/A | N/A | 68476 | 68495 | ATGGAACAGAACTTAGGAGG | 59 | 1072 |
| 875163 | N/A | N/A | 70051 | 70070 | ATGTATTATACAGATTATAT | 74 | 1073 |
| 875187 | N/A | N/A | 72064 | 72083 | GGGCAGAAACTTAGTCATTT | 82 | 1074 |
| 875211 | N/A | N/A | 73872 | 73891 | TCTTACCAACACCTCATCTT | 87 | 1075 |
| 875235 | N/A | N/A | 76039 | 76058 | TTAATTTAGCAAATGGAATC | 117 | 1076 |
| 875259 | N/A | N/A | 77632 | 77651 | AAATTTTGATTAGCATTGCC | 60 | 1077 |
| 875283 | N/A | N/A | 80616 | 80635 | GTTATAACCAACATCTATAT | 97 | 1078 |
| 875307 | N/A | N/A | 82190 | 82209 | CTATTATCTTATCACAAAAT | 108 | 1079 |
| 875331 | N/A | N/A | 83977 | 83996 | GTTGCTAAACTGTAACATCC | 91 | 1080 |
| 875355 | N/A | N/A | 85061 | 85080 | TTCCCAAAGGGTTAATTAGG | 63 | 1081 |
| 875379 | N/A | N/A | 87247 | 87266 | GCCTACTGGTGTTAACACCA | 89 | 1082 |
| 875403 | N/A | N/A | 90168 | 90187 | AATGGAGTCTCACTCTATAG | 72 | 1083 |
| 875427 | N/A | N/A | 92352 | 92371 | TAAGCTGTGCTATGGTGGTT | 27 | 1084 |
| 875451 | N/A | N/A | 95230 | 95249 | ATTTATATATGTAAATTATA | 140 | 1085 |
| | | | 95290 | 95309 | | | |
| 875475 | N/A | N/A | 96989 | 97008 | ACTTACACAGTAAAAATGGT | 70 | 1086 |
| 875499 | N/A | N/A | 98735 | 98754 | ACACTATGAAGCAGGTTCTA | 66 | 1087 |
| 875523 | N/A | N/A | 100418 | 100437 | TAAGTGATGAGGTTTTTAAG | 80 | 1088 |
| 875547 | N/A | N/A | 103306 | 103325 | ACCTATTAGAACTGACAAAC | 122 | 1089 |
| 875571 | N/A | N/A | 107260 | 107279 | GGGTTATAAAATGTTATTTG | 35 | 1090 |
| 875595 | N/A | N/A | 110110 | 110129 | GCAATGTGGATACTAGTTCA | 52 | 1091 |
| 875619 | N/A | N/A | 112569 | 112588 | TCCTCTTATACTTGTCATTT | 126 | 1092 |
| 875643 | N/A | N/A | 114953 | 114972 | AGGACTATTACTAATAATTT | 72 | 1093 |
| 875667 | N/A | N/A | 116631 | 116650 | CACACCAGGCCTCCAATTAC | 85 | 1094 |
| 875691 | N/A | N/A | 120228 | 120247 | GGGCACGATCTCAAAACAAT | 70 | 1095 |
| 875715 | N/A | N/A | 123671 | 123690 | TGCAAAGACAGGGTTTTGTC | 86 | 1096 |
| 875739 | N/A | N/A | 126238 | 126257 | AAACAAATCCAAATTGCAAG | 54 | 1097 |
| 875763 | N/A | N/A | 129540 | 129559 | TACAAAAATATTAGCCAGCT | 83 | 1098 |
| 875787* | N/A | N/A | 131307 | 131326 | AAACAGCTGTAAACTCTCAA | 81 | 1099 |
| 875811 | N/A | N/A | 133194 | 133213 | AAACTAAACACCTTTGATCA | 80 | 1100 |
| 875835 | N/A | N/A | 134893 | 134912 | AAAAGGTGACATAAAATTGT | 119 | 1101 |
| 875859 | N/A | N/A | 137537 | 137556 | AGCCATGCACAGGACTGAAA | 104 | 1102 |
| 875883 | N/A | N/A | 139441 | 139460 | CTTTGGTCCAGACCTAGTCC | 63 | 1103 |
| 875907 | N/A | N/A | 142390 | 142409 | AAGACAGTCCTTTTTTTCTA | 52 | 1104 |
| 875931 | N/A | N/A | 144082 | 144101 | TAATACAGCTCTACATATGA | 95 | 1105 |
| 875955 | N/A | N/A | 146118 | 146137 | AAAGCAGATATATGGATAAC | 94 | 1106 |
| 875979 | N/A | N/A | 147776 | 147795 | ACAGGCAACATCTCCGGCTT | 86 | 1107 |

TABLE 16
Percent control of human ATXN2 RNA with 5-10-5 MOE gapmers
with mixed internucleoside linkages

| | SEQ ID | SEQ ID | SEQ ID | SEQ ID | | | |
|---|---|---|---|---|---|---|---|
| | NO: 1 | NO: 1 | NO: 2 | NO: 2 | | | |
| Compound | Start | Stop | Start | Stop | | ATXN2 % | SEQ |
| Number | Site | Site | Site | Site | Sequence (5′ to 3′) | control | ID NO |
| 708199 | 1477 | 1496 | 81637 | 81656 | GCTAACTGGTTTGCCCTTGC | 26 | 32 |
| 874162 | 114 | 133 | 2104 | 2123 | GGGAGCGGAGGTGCGGATAG | 114 | 1108 |
| 874186 | 301 | 320 | 2291 | 2310 | GCGGAGGGATACGGTCCCGG | 119 | 1109 |
| 874210 | 990 | 1009 | N/A | N/A | GTACTTCACATTTGGAGCCA | 46 | 1110 |
| 874232 | 1473 | 1492 | 81633 | 81652 | ACTGGTTTGCCCTTGCTTCC | 90 | 1111 |
| 874255 | 1656 | 1675 | 83267 | 83286 | ATATGACTTCTCTATTTCTT | 48 | 1112 |
| 874279 | 2458 | 2477 | 91728 | 91747 | GATGTTTCATTGGGTTTAAT | 25 | 1113 |
| 874303 | 2762 | 2781 | 113071 | 113090 | CTCCGTGTTACTAAGTATTG | 73 | 1114 |
| 874326 | 3486 | 3505 | 136959 | 136978 | CCTTGTTGTATGGTAATTTG | 45 | 1115 |
| 874349 | 4176 | 4195 | 148927 | 148946 | ATAAATGAAATTCTAGTTTT | 150 | 1116 |
| 874373 | 4321 | 4340 | 149072 | 149091 | GACTCTGAAACAGCATATGG | 82 | 1117 |
| 874396 | 4505 | 4524 | 149256 | 149275 | CTTTGTCAAGTTTAGTAAAA | 78 | 1118 |
| 874420 | 4643 | 4662 | 149394 | 149413 | AGTTTTTATTTTATATTATC | 95 | 1119 |
| 874444 | N/A | N/A | 146603 | 146622 | AAGGTAGCCTTCTGAGAGAT | 60 | 1120 |
| 874468 | N/A | N/A | 3532 | 3551 | CGGGAGCCCCCGCCGCCGCC | 92 | 1121 |
| 874492 | N/A | N/A | 2996 | 3015 | GTCTCCCCCGCGCTGCCGGC | 89 | 1122 |
| 874516 | N/A | N/A | 5636 | 5655 | ACATGGCAAAATCCCGTCCT | 96 | 1123 |
| 874540 | N/A | N/A | 8113 | 8132 | ACCATGACTGATCCCATGTT | 78 | 1124 |
| 874564 | N/A | N/A | 10830 | 10849 | CTGCATATAGCAAGAGATGT | 68 | 1125 |
| 874588 | N/A | N/A | 14371 | 14390 | AATTATAATCAAGATTAATT | 89 | 1126 |
| 874612 | N/A | N/A | 17241 | 17260 | AAAAATTCATTGAACTGTTG | 70 | 1127 |
| 874636 | N/A | N/A | 19633 | 19652 | CTACTATGTGCCAAGAACAG | 90 | 1128 |
| 874660 | N/A | N/A | 21433 | 21452 | GCCTGTAATCCCTCCCAACA | 134 | 1129 |
| 874684 | N/A | N/A | 26574 | 26593 | TGTTTCCCTCCCTTTTTAAT | 71 | 1130 |
| 874708 | N/A | N/A | 29092 | 29111 | AACAGCAAAAGGTAGGCTAG | 66 | 1131 |
| 874732 | N/A | N/A | 31705 | 31724 | TATGTCATGCTGTCCAATAT | 86 | 1132 |
| 874756 | N/A | N/A | 32845 | 32864 | TAAGGTTAACTCACTTAGGT | 68 | 1133 |
| 874780 | N/A | N/A | 35982 | 36001 | TGCCTCTCTATTCCCTGAGA | 68 | 1134 |
| 874804 | N/A | N/A | 37534 | 37553 | AAGGCACATTGTGTGGCCAA | 104 | 1135 |
| 874828 | N/A | N/A | 39544 | 39563 | CCCGGCCTCGAGACTCCACC | 81 | 1136 |
| 874852 | N/A | N/A | 42204 | 42223 | TAGGAGGAGAACTTATGAAT | 56 | 1137 |
| 874876 | N/A | N/A | 44007 | 44026 | AGCTGGTATTTAAACCAGGT | 128 | 1138 |
| 874900 | N/A | N/A | 45369 | 45388 | TGAGGCAGGATCACCAGAGT | 46 | 1139 |
| 874924 | N/A | N/A | 46715 | 46734 | CAACCACACTACTCCATATT | 85 | 1140 |
| 874948 | N/A | N/A | 48866 | 48885 | TAAAATAATCAGTATTTGAA | 87 | 1141 |
| 874972 | N/A | N/A | 51110 | 51129 | ATTTTTGAATTTATAACAGA | 134 | 1142 |
| 874996 | N/A | N/A | 54214 | 54233 | AGGTTTCCCTGGCTGGGCGC | 79 | 1143 |
| 875020 | N/A | N/A | 56850 | 56869 | GGACCTGGCAGTTAGAGGTT | 90 | 1144 |
| 875044 | N/A | N/A | 58517 | 58536 | CTGGCCTCAATAAGTGCCAC | 90 | 1145 |
| 875068 | N/A | N/A | 61079 | 61098 | AAATCATTACAAGTGAGGAG | 47 | 1146 |
| 875092 | N/A | N/A | 63237 | 63256 | TCTCACTTGGCTCACTGCAG | 69 | 1147 |
| 875116 | N/A | N/A | 65143 | 65162 | TGTAAAATGATACAGCTACG | 81 | 1148 |
| 875140 | N/A | N/A | 68607 | 68626 | AGAAGTGTAAAGTTTATAGC | 112 | 1149 |
| 875164 | N/A | N/A | 70065 | 70084 | TATACTACTACACCATGTAT | 159 | 1150 |
| 875212 | N/A | N/A | 73918 | 73937 | TGAATTTTGGAAAATCTCTC | 94 | 1151 |
| 875236 | N/A | N/A | 76149 | 76168 | AGACCAATGCACTATAATAA | 117 | 1152 |
| 875284 | N/A | N/A | 80623 | 80642 | TCATTCAGTTATAACCAACA | 60 | 1153 |
| 875308 | N/A | N/A | 82230 | 82249 | ATAAACTCTTCTCCCAACTC | 68 | 1154 |
| 875332 | N/A | N/A | 84070 | 84089 | AAAGATCCACAACCTACAAG | 87 | 1155 |
| 875356 | N/A | N/A | 85062 | 85081 | GTTCCCAAAGGGTTAATTAG | 177 | 1156 |
| 875380 | N/A | N/A | 87346 | 87365 | CTGCCATGCCACTAGTGACT | 73 | 1157 |
| 875404 | N/A | N/A | 90195 | 90214 | GAAGCAGATTTTTTTTTTTT | 27 | 1158 |
| 875428 | N/A | N/A | 92385 | 92404 | TCACTGAACAAAGTACAAAT | 68 | 1159 |
| 875452 | N/A | N/A | 95260 | 95279 | AACCACTGATTTATACACTT | 20 | 1160 |
| | | | 95320 | 95339 | | | |
| 875476 | N/A | N/A | 97064 | 97083 | TGCCTGGCCAAGAATAGTCT | 100 | 1161 |
| 875500 | N/A | N/A | 98816 | 98835 | GAACATGTATTGAATACATA | 55 | 1162 |
| 875524 | N/A | N/A | 100442 | 100461 | CAGAAGACAAAGATATTAGC | 128 | 1163 |
| 875548 | N/A | N/A | 104013 | 104032 | ATATTATTTATACTGTGTAT | 50 | 1164 |
| 875572 | N/A | N/A | 107323 | 107342 | GTTTTCTCTTTGCTTGCTTG | 23 | 1165 |
| 875596 | N/A | N/A | 110114 | 110133 | TCTTGCAATGTGGATACTAG | 79 | 1166 |
| 875620 | N/A | N/A | 112575 | 112594 | TTTCTATCCTCTTATACTTG | 71 | 1167 |
| 875644 | N/A | N/A | 114990 | 115009 | CACACTAAAACAAAATTCAG | 96 | 1168 |
| 875668 | N/A | N/A | 117316 | 117335 | GCTCTCGAACTCATGGGTTC | 144 | 1169 |
| 875692 | N/A | N/A | 120399 | 120418 | AGCCTGGGAAGCACGGAGAA | 83 | 1170 |
| 875716 | N/A | N/A | 123804 | 123823 | ATCACCCCTCCATCGCCCTC | 93 | 1171 |
| 875740 | N/A | N/A | 126330 | 126349 | TAGGTGACAGAGCCAAGATT | 110 | 1172 |
| 875764 | N/A | N/A | 129790 | 129809 | TGTTACTTATTACCTTCCTG | 30 | 1173 |
| 875788* | N/A | N/A | 131325 | 131344 | TGGTTTCCAGATTTCCAGAA | 75 | 1174 |
| 875812 | N/A | N/A | 133282 | 133301 | CACAATTTTTTATTTAAAAT | 195 | 1175 |
| 875836 | N/A | N/A | 134901 | 134920 | TGAATGAGAAAAGGTGACAT | 101 | 1176 |
| 875860 | N/A | N/A | 137712 | 137731 | GCCAGCATGCATGGCTGATT | 97 | 1177 |
| 875884 | N/A | N/A | 139457 | 139476 | TCAAAGACATATGCTTCTTT | 70 | 1178 |
| 875908 | N/A | N/A | 142421 | 142440 | CTTCCTGAGCTTCACAGTCC | 61 | 1179 |
| 875932 | N/A | N/A | 144151 | 144170 | ATTTAAACCATCCATTGTCT | 70 | 1180 |
| 875956 | N/A | N/A | 146131 | 146150 | ACAACTTATGGTCAAAGCAG | 29 | 1181 |
| 875980 | N/A | N/A | 147793 | 147812 | AGAGCTCTTTTACGCATACA | 71 | 1182 |

TABLE 17
Percent control of human ATXN2 RNA with 5-10-5 MOE gapmers
with mixed internucleoside linkages

| | SEQ ID | SEQ ID | SEQ ID | SEQ ID | | | |
|---|---|---|---|---|---|---|---|
| | NO: 1 | NO: 1 | NO: 2 | NO: 2 | | | |
| Compound | Start | Stop | Start | Stop | | ATXN2 % | SEQ |
| Number | Site | Site | Site | Site | Sequence (5′ to 3′) | control | ID NO |
| 708199 | 1477 | 1496 | 81637 | 81656 | GCTAACTGGTTTGCCCTTGC | 26 | 32 |
| 874163 | 153 | 172 | 2143 | 2162 | CTGAGCGCATCGGAGGGCGG | 113 | 1183 |
| 874187 | 353 | 372 | 2343 | 2362 | AGGCGAGCTCTGCCGGGAGG | 83 | 1184 |
| 874211 | 991 | 1010 | 48690 | 48709 | TGTACTTCACATTTGGAGCC | 25 | 1185 |
| 874233 | 1475 | 1494 | 81635 | 81654 | TAACTGGTTTGCCCTTGCTT | 65 | 1186 |
| 874256 | 1758 | 1777 | 83369 | 83388 | AATTCGGGTTGAAATCTGAA | 81 | 1187 |
| 874280 | 2460 | 2479 | 91730 | 91749 | GTGATGTTTCATTGGGTTTA | 6 | 1188 |
| 874304 | 2764 | 2783 | 113073 | 113092 | TGCTCCGTGTTACTAAGTAT | 48 | 1189 |
| 874327 | 3487 | 3506 | 136960 | 136979 | TCCTTGTTGTATGGTAATTT | 23 | 1190 |
| 874350 | 4181 | 4200 | 148932 | 148951 | ACAAAATAAATGAAATTCTA | 80 | 1191 |
| 874397 | 4510 | 4529 | 149261 | 149280 | TGAAACTTTGTCAAGTTTAG | 74 | 1192 |
| 874421 | 4648 | 4667 | 149399 | 149418 | TTTTAAGTTTTTATTTTATA | 82 | 1193 |
| 874469 | N/A | N/A | 3537 | 3556 | GAGTTCGGGAGCCCCCGCCG | 85 | 1194 |
| 874493 | N/A | N/A | 3003 | 3022 | CGAGCGAGTCTCCCCCGCGC | 98 | 1195 |
| 874517 | N/A | N/A | 5901 | 5920 | AAAAGCAAAAATAAGAATTA | 77 | 1196 |
| 874541 | N/A | N/A | 8117 | 8136 | GAACACCATGACTGATCCCA | 23 | 1197 |
| 874565 | N/A | N/A | 10902 | 10921 | TAGCACCTGAGCCCCACCTG | 70 | 1198 |
| 874589 | N/A | N/A | 14504 | 14523 | CTTCAATTCCTGATTTCGAA | 74 | 1199 |
| 874613 | N/A | N/A | 17561 | 17580 | AAAAAAAATTTTTGGCTAGG | 78 | 1200 |
| 874637 | N/A | N/A | 19886 | 19905 | TTTCAAGTCTATCAACAGAT | 63 | 1201 |
| 874661 | N/A | N/A | 21470 | 21489 | AATGGGAAGAAAGAGGAGGC | 78 | 1202 |
| 874685 | N/A | N/A | 26678 | 26697 | GAGGACAGGATAACAGATTA | 31 | 1203 |
| 874709 | N/A | N/A | 29104 | 29123 | GAGTTGAAGTCTAACAGCAA | 44 | 1204 |
| 874733 | N/A | N/A | 31730 | 31749 | ACTTTGTACAATGATGAAGA | 87 | 1205 |
| 874757 | N/A | N/A | 32856 | 32875 | GTTCCACCTCTTAAGGTTAA | 59 | 1206 |
| 874781 | N/A | N/A | 36132 | 36151 | TTATAGTAATCTGTAATCAG | 56 | 1207 |
| | | | 36238 | 36257 | | | |
| 874805 | N/A | N/A | 37550 | 37569 | ATAGATATAGCCCCCAAAGG | 165 | 1208 |
| 874829 | N/A | N/A | 39845 | 39864 | GCAAGACTCCGTCTTTCTGT | 93 | 1209 |
| 874853 | N/A | N/A | 42212 | 42231 | AAACATCATAGGAGGAGAAC | 108 | 1210 |
| 874877 | N/A | N/A | 44056 | 44075 | CTCAGCAGTCAAGTATCTTG | 68 | 1211 |
| 874901 | N/A | N/A | 45525 | 45544 | AGAAGGAAGCAAACTAGAAA | 74 | 1212 |
| 874925 | N/A | N/A | 46792 | 46811 | CAGGTCATACCTTCATAGAA | 62 | 1213 |
| 874949 | N/A | N/A | 48877 | 48896 | AAACCAGTCTATAAAATAAT | 92 | 1214 |
| 874973 | N/A | N/A | 51139 | 51158 | TTCAACTAAAATTTTATCTT | 182 | 1215 |
| 874997 | N/A | N/A | 54231 | 54250 | ACTCCGCCTCAAAATAAAGG | 79 | 1216 |
| 875021 | N/A | N/A | 56853 | 56872 | AAAGGACCTGGCAGTTAGAG | 93 | 1217 |
| 875045 | N/A | N/A | 58639 | 58658 | TAATAAACATGTAATGCTTT | 100 | 1218 |
| 875069 | N/A | N/A | 61085 | 61104 | TTTCTTAAATCATTACAAGT | 81 | 1219 |
| 875093 | N/A | N/A | 63247 | 63266 | GAAACCAGGGTCTCACTTGG | 95 | 1220 |
| 875117 | N/A | N/A | 65191 | 65210 | GGTGAGGATGTGAAAAACAT | 119 | 1221 |
| 875141 | N/A | N/A | 68674 | 68693 | GATTAGGAGTAGACAGAGTT | 90 | 1222 |
| 875165 | N/A | N/A | 70194 | 70213 | TGTATAAACATTTTCTGAAT | 67 | 1223 |
| 875189 | N/A | N/A | 72110 | 72129 | GCTACCCCCACAGCAGTGGG | 90 | 1224 |
| 875213 | N/A | N/A | 73928 | 73947 | TAGAAATGGCTGAATTTTGG | 69 | 1225 |
| 875237 | N/A | N/A | 76502 | 76521 | GTCATACTGACCAGAGTCTA | 158 | 1226 |
| 875285 | N/A | N/A | 80645 | 80664 | ATGTCAAAGTAGTTGTTCCC | 103 | 1227 |
| 875309 | N/A | N/A | 82340 | 82359 | TGCTGCACCTGACACAGATC | 93 | 1228 |
| 875333 | N/A | N/A | 84072 | 84091 | GAAAAGATCCACAACCTACA | 63 | 1229 |
| 875357 | N/A | N/A | 85116 | 85135 | AATTCACATTTTACTTTAAC | 101 | 1230 |
| 875405 | N/A | N/A | 90206 | 90225 | ACAGAATAGCTGAAGCAGAT | 34 | 1231 |
| 875429 | N/A | N/A | 92388 | 92407 | GCTTCACTGAACAAAGTACA | 80 | 1232 |
| 875453 | N/A | N/A | 95293 | 95312 | TTGATTTATATATGTAAATT | 101 | 1233 |
| 875477 | N/A | N/A | 97173 | 97192 | GACATGCGGTTTCACCATTT | 28 | 1234 |
| 875501 | N/A | N/A | 98850 | 98869 | AATACTGGGTCATCTATATT | 108 | 1235 |
| 875525 | N/A | N/A | 100484 | 100503 | ACCTTTAAAGTAGACTGCAA | 60 | 1236 |
| 875549 | N/A | N/A | 104018 | 104037 | TATATATATTATTTATACTG | 104 | 1237 |
| 875573 | N/A | N/A | 107414 | 107433 | ACTACAGTTTTTTAAGACAT | 63 | 1238 |
| 875597 | N/A | N/A | 110197 | 110216 | GAGTGCTTGTGCCAGCCTTC | 117 | 1239 |
| 875621 | N/A | N/A | 112598 | 112617 | TGGGTGAGAAAAATATGAAA | 108 | 1240 |
| 875645 | N/A | N/A | 114996 | 115015 | GTTCAGCACACTAAAACAAA | 68 | 1241 |
| 875669 | N/A | N/A | 117334 | 117353 | CACTATATTGCCCATGCTGC | 135 | 1242 |
| 875693 | N/A | N/A | 120627 | 120646 | ACCTATAGTCAGGGCATGGT | 70 | 1243 |
| 875717 | N/A | N/A | 123819 | 123838 | CTCACTGCAACCTCGATCAC | 87 | 1244 |
| 875741 | N/A | N/A | 126725 | 126744 | AAAATACAAGGCCGGGCGCA | 352 | 1245 |
| 875765 | N/A | N/A | 129856 | 129875 | ACTTTTATCAAATGAAAGTT | 139 | 1246 |
| 875789* | N/A | N/A | 131417 | 131436 | CATGAGGATGCTGTGTTCAA | 67 | 1247 |
| 875813 | N/A | N/A | 133329 | 133348 | TACGGATGGGCCTCTTGAAA | 41 | 1248 |
| 875837 | N/A | N/A | 134997 | 135016 | CATACTAAAAATTTAAAAAC | 80 | 1249 |
| 875861 | N/A | N/A | 137893 | 137912 | TTAAGCTCAAGATATCCTGA | 37 | 1250 |
| 875885 | N/A | N/A | 139585 | 139604 | CATTCTGGCTAAAGATCCCA | 96 | 1251 |
| 875933 | N/A | N/A | 144213 | 144232 | TGAACTTTCTTGATGGTTAC | 64 | 1252 |
| 875957 | N/A | N/A | 146218 | 146237 | TGCTCTTAAAGAAAAATGGG | 66 | 1253 |
| 875981 | N/A | N/A | 147796 | 147815 | CAGAGAGCTCTTTTACGCAT | 51 | 1254 |

TABLE 18
Percent control of human ATXN2 RNA with 5-10-5 MOE gapmers
with mixed internucleoside linkages

| | SEQ ID | SEQ ID | SEQ ID | SEQ ID | | | |
|---|---|---|---|---|---|---|---|
| | NO: 1 | NO: 1 | NO: 2 | NO: 2 | | | |
| Compound | Start | Stop | Start | Stop | | ATXN2 % | SEQ |
| Number | Site | Site | Site | Site | Sequence (5′ to 3′) | control | ID NO |
| 708199 | 1477 | 1496 | 81637 | 81656 | GCTAACTGGTTTGCCCTTGC | 28 | 32 |
| 760782 | 1479 | 1498 | 81639 | 81658 | CTGCTAACTGGTTTGCCCTT | 55 | 1255 |
| 874164 | 158 | 177 | 2148 | 2167 | GGCCGCTGAGCGCATCGGAG | 104 | 1256 |
| 874188 | 358 | 377 | 2348 | 2367 | GAGGGAGGCGAGCTCTGCCG | 94 | 1257 |
| 874212 | 993 | 1012 | 48692 | 48711 | CTTGTACTTCACATTTGGAG | 27 | 1258 |
| 874257 | 1760 | 1779 | 83371 | 83390 | AGAATTCGGGTTGAAATCTG | 57 | 1259 |
| 874281 | 2461 | 2480 | 91731 | 91750 | GGTGATGTTTCATTGGGTTT | 22 | 1260 |
| 874305 | 2765 | 2784 | 113074 | 113093 | GTGCTCCGTGTTACTAAGTA | 64 | 1261 |
| 874328 | 3489 | 3508 | 136962 | 136981 | TCTCCTTGTTGTATGGTAAT | 42 | 1262 |
| 874351 | 4186 | 4205 | 148937 | 148956 | TAAAAACAAAATAAATGAAA | 100 | 1263 |
| 874375 | 4331 | 4350 | 149082 | 149101 | GTACCTGCGGGACTCTGAAA | 81 | 1264 |
| 874398 | 4515 | 4534 | 149266 | 149285 | TTTACTGAAACTTTGTCAAG | 69 | 1265 |
| 874422 | 4653 | 4672 | 149404 | 149423 | ATTTTTTTTAAGTTTTTATT | 128 | 1266 |
| 874470 | N/A | N/A | 3557 | 3576 | GGAGCCCCACGATTTCAGGG | 65 | 1267 |
| 874494 | N/A | N/A | 3037 | 3056 | CTGCGCCCACCGGCCGAGCC | 93 | 1268 |
| 874518 | N/A | N/A | 6371 | 6390 | AAAAATGTTCACTGCACCAC | 67 | 1269 |
| 874542 | N/A | N/A | 8121 | 8140 | AAAGGAACACCATGACTGAT | 66 | 1270 |
| 874566 | N/A | N/A | 10936 | 10955 | GAACCAGACTGCACAACAGG | 82 | 1271 |
| 874590 | N/A | N/A | 14650 | 14669 | GCTAAAGCAGGAGGACAGTT | 111 | 1272 |
| 874614 | N/A | N/A | 17582 | 17601 | ATATCAATAAAAAATTACTT | 71 | 1273 |
| 874638 | N/A | N/A | 19928 | 19947 | ATCATTACGACCATTCTGCT | 61 | 1274 |
| 874662 | N/A | N/A | 21807 | 21826 | AGGAGCGCGCCACCGTGCCT | 98 | 1275 |
| 874686 | N/A | N/A | 26733 | 26752 | GAATTTGAATAGGTCATTTA | 89 | 1276 |
| 874710 | N/A | N/A | 29848 | 29867 | CTGAGATCAGGAGACCAGCC | 125 | 1277 |
| 874734 | N/A | N/A | 31806 | 31825 | CCTAGACACACCAAAAAATC | 119 | 1278 |
| 874758 | N/A | N/A | 32891 | 32910 | ATCAGTTAGACAATTAACTA | 80 | 1279 |
| 874782 | N/A | N/A | 36313 | 36332 | TGCTCTCTTTGCGCCTGTGT | 31 | 1280 |
| 874806 | N/A | N/A | 37712 | 37731 | TGTCATATACCCACTACTCA | 37 | 1281 |
| 874830 | N/A | N/A | 40133 | 40152 | CATAAAATTAAAATACTACA | 77 | 1282 |
| 874854 | N/A | N/A | 42262 | 42281 | ACCACGCCCGGCCAAAGATG | 117 | 1283 |
| 874878 | N/A | N/A | 44068 | 44087 | AGGAAACTGAACCTCAGCAG | 112 | 1284 |
| 874902 | N/A | N/A | 45563 | 45582 | CACTGCTTGCCTGGAGACCC | 125 | 1285 |
| 874926 | N/A | N/A | 46840 | 46859 | GAAATGTACCCTAAGAAGGG | 111 | 1286 |
| 874950 | N/A | N/A | 49008 | 49027 | TCTTAAGTACATTAATAATA | 115 | 1287 |
| 874974 | N/A | N/A | 51158 | 51177 | CAGAGTGCTATGTATTAAAT | 52 | 1288 |
| 874998 | N/A | N/A | 54550 | 54569 | GAACTTAAAAGTCACACTGA | 134 | 1289 |
| 875022 | N/A | N/A | 56884 | 56903 | AAGTGCAGCAATAAAGACAG | 95 | 1290 |
| 875046 | N/A | N/A | 58702 | 58721 | ATTTCTATATACTCTAAAAA | 86 | 1291 |
| 875070 | N/A | N/A | 61108 | 61127 | CAATAAAATAAAAATAAACT | 87 | 1292 |
| 875094 | N/A | N/A | 63266 | 63285 | TAGTAACCTTTTTTTTTTTG | 73 | 1293 |
| 875118 | N/A | N/A | 65226 | 65245 | GGGTATAATCAAAGAGACAG | 85 | 1294 |
| 875142 | N/A | N/A | 68733 | 68752 | TACATTCCTAACTAATCAGC | 137 | 1295 |
| 875166 | N/A | N/A | 70825 | 70844 | AAAAACAAAAAAATGTGTAT | 135 | 1296 |
| 875190 | N/A | N/A | 72135 | 72154 | TCCAGCCCCTGTATCCCACC | 70 | 1297 |
| 875214 | N/A | N/A | 74077 | 74096 | GGAATAAAAGCATTAATCCA | 148 | 1298 |
| 875238 | N/A | N/A | 76541 | 76560 | CAACAAAAGCACATTTAAAT | 75 | 1299 |
| 875262 | N/A | N/A | 77753 | 77772 | TCTGCAGAAAAAGAAAAAAA | 117 | 1300 |
| 875286 | N/A | N/A | 80664 | 80683 | ATGAAGCTTGTTTTTCAAAA | 98 | 1301 |
| 875310 | N/A | N/A | 82410 | 82429 | CCAACAGGGTGCTCTTTAGC | 52 | 1302 |
| 875334 | N/A | N/A | 84147 | 84166 | AAGTTAGTAACATACTATTG | 64 | 1303 |
| 875358 | N/A | N/A | 85131 | 85150 | AACTTAACTGACATAAATTC | 73 | 1304 |
| 875382 | N/A | N/A | 87622 | 87641 | ACACCCCGATACCACTAAAA | 112 | 1305 |
| 875406 | N/A | N/A | 90234 | 90253 | AGACCATCTAAGTAATGTCA | 43 | 1306 |
| 875430 | N/A | N/A | 92407 | 92426 | CTTGCTCTACTAATATCTAG | 83 | 1307 |
| 875454 | N/A | N/A | 95304 | 95323 | ACTTTAAATGGTTGATTTAT | 66 | 1308 |
| 875478 | N/A | N/A | 97379 | 97398 | ATGTGAAGATAATTCAATGG | 71 | 1309 |
| 875502 | N/A | N/A | 98921 | 98940 | AGCAGAAAACTGAAATTCTT | 64 | 1310 |
| 875526 | N/A | N/A | 101064 | 101083 | AATTTTAAAGGCCGGGCACG | 125 | 1311 |
| 875550 | N/A | N/A | 104158 | 104177 | CGAATTCAGTAACACATTAA | 78 | 1312 |
| 875574 | N/A | N/A | 108028 | 108047 | AAGAACTACAATTTTTTTTT | 82 | 1313 |
| 875598 | N/A | N/A | 110258 | 110277 | TCATAGTCAGTGGACTTGGG | 79 | 1314 |
| 875622 | N/A | N/A | 112622 | 112641 | CCACATGTCAGAAATTGTGC | 71 | 1315 |
| 875646 | N/A | N/A | 115026 | 115045 | ATGGCCATGTAAAAAAAAGA | 82 | 1316 |
| 875670 | N/A | N/A | 117477 | 117496 | GTAGGTATATATAAAGCAAG | 34 | 1317 |
| 875694 | N/A | N/A | 120644 | 120663 | AAGCAAGTAAAAAGATAACC | 136 | 1318 |
| 875718 | N/A | N/A | 123915 | 123934 | TCACAGTAAGAAAAGAAACA | 86 | 1319 |
| 875742 | N/A | N/A | 127208 | 127227 | GACAAGACAAGAAAAGAAAA | 142 | 1320 |
| 875766 | N/A | N/A | 129887 | 129906 | TAAACAAAAAAGCCACTGAA | 103 | 1321 |
| 875790* | N/A | N/A | 131421 | 131440 | TAGACATGAGGATGCTGTGT | 81 | 1322 |
| 875814 | N/A | N/A | 133409 | 133428 | AACTAAAGACAAGTCAAATG | 89 | 1323 |
| 875838 | N/A | N/A | 135021 | 135040 | TAATGTTAGCATATGTGTAT | 51 | 1324 |
| 875862 | N/A | N/A | 137974 | 137993 | CTATTTCTGTACTTTTTGCC | 42 | 1325 |
| 875886 | N/A | N/A | 139601 | 139620 | TTTTGTTATATATGCTCATT | 37 | 1326 |
| 875910 | N/A | N/A | 142529 | 142548 | TGCCAGAATATTTTAACAAG | 61 | 1327 |
| 875934 | N/A | N/A | 144707 | 144726 | AGTTTCACAGTGTTCGCCAG | 55 | 1328 |
| 875958 | N/A | N/A | 146252 | 146271 | ACACTGGAGGTGAGCTCCAA | 112 | 1329 |
| 875982 | N/A | N/A | 147991 | 148010 | CCTGCACACACACGCCTCAC | 135 | 1330 |

TABLE 19
Percent control of human ATXN2 RNA with 5-10-5 MOE gapmers
with mixed internucleoside linkages

| | SEQ ID | SEQ ID | SEQ ID | SEQ ID | | | |
|---|---|---|---|---|---|---|---|
| | NO: 1 | NO: 1 | NO: 2 | NO: 2 | | | |
| Compound | Start | Stop | Start | Stop | | ATXN2 % | SEQ |
| Number | Site | Site | Site | Site | Sequence (5′ to 3′) | control | ID NO |
| 708199 | 1477 | 1496 | 81637 | 81656 | GCTAACTGGTTTGCCCTTGC | 45 | 32 |
| 874165 | 163 | 182 | 2153 | 2172 | GCTGCGGCCGCTGAGCGCAT | 111 | 1331 |
| 874189 | 363 | 382 | 2353 | 2372 | AGGCGGAGGGAGGCGAGCTC | 100 | 1332 |
| 874213 | 994 | 1013 | 48693 | 48712 | ACTTGTACTTCACATTTGGA | 49 | 1333 |
| 874234 | 1533 | 1552 | 81693 | 81712 | CATCATTTTCCAGGGCCACT | 53 | 1334 |
| 874258 | 1762 | 1781 | 83373 | 83392 | CCAGAATTCGGGTTGAAATC | 42 | 1335 |
| 874282 | 2462 | 2481 | 91732 | 91751 | AGGTGATGTTTCATTGGGTT | 16 | 1336 |
| 874306 | 2766 | 2785 | 113075 | 113094 | TGTGCTCCGTGTTACTAAGT | 71 | 1337 |
| 874329 | 3491 | 3510 | 136964 | 136983 | TGTCTCCTTGTTGTATGGTA | 49 | 1338 |
| 874352 | 4191 | 4210 | 148942 | 148961 | TATTTTAAAAACAAAATAAA | 88 | 1339 |
| 874376 | 4351 | 4370 | 149102 | 149121 | TTTCGGCAAGCAGAGCTGGG | 100 | 1340 |
| 874399 | 4520 | 4539 | 149271 | 149290 | AAGAATTTACTGAAACTTTG | 54 | 1341 |
| 874423 | 4658 | 4677 | 149409 | 149428 | TTTAAATTTTTTTTAAGTTT | 103 | 1342 |
| 874471 | N/A | N/A | 3562 | 3581 | CACATGGAGCCCCACGATTT | 102 | 1343 |
| 874495 | N/A | N/A | 3082 | 3101 | TGCTGCGGGAGGCTGGACAG | 121 | 1344 |
| 874519 | N/A | N/A | 6400 | 6419 | AATAATTACACTGAAGCAAA | 60 | 1345 |
| 874543 | N/A | N/A | 8244 | 8263 | TCCTTTAAGTCAAAATATAT | 81 | 1346 |
| 874567 | N/A | N/A | 10956 | 10975 | AAAAAAAACAGGCCTGTTAG | 103 | 1347 |
| 874591 | N/A | N/A | 14654 | 14673 | AGAGGCTAAAGCAGGAGGAC | 39 | 1348 |
| 874615 | N/A | N/A | 17664 | 17683 | CCTAGCTTAGATATAACCTC | 42 | 1349 |
| 874639 | N/A | N/A | 19930 | 19949 | GCATCATTACGACCATTCTG | 16 | 1350 |
| 874663 | N/A | N/A | 22432 | 22451 | AATCATATGTTCACACAAAA | 73 | 1351 |
| 874687 | N/A | N/A | 26823 | 26842 | AATAACATTTTTTAATACCA | 80 | 1352 |
| 874711 | N/A | N/A | 29958 | 29977 | CATGGCTTAAAGCTCAGAAT | 119 | 1353 |
| 874735 | N/A | N/A | 31839 | 31858 | CTTGGTCATGAAGCCATGAA | 81 | 1354 |
| 874759 | N/A | N/A | 32915 | 32934 | ACTTAAGTAACTAATATTTA | 95 | 1355 |
| 874783 | N/A | N/A | 36363 | 36382 | GGAAACCCCGAGTCGGGCAA | 94 | 1356 |
| 874807 | N/A | N/A | 37726 | 37745 | ATTACTAGTGTATCTGTCAT | 47 | 1357 |
| 874831 | N/A | N/A | 40160 | 40179 | AAACCTCCGTCTCAAAGAAA | 89 | 1358 |
| 874855 | N/A | N/A | 42417 | 42436 | GCTAGGACTACAGGTACGCG | 87 | 1359 |
| 874879 | N/A | N/A | 44193 | 44212 | AAATTCCTGAAGTCTAAGGA | 148 | 1360 |
| 874903 | N/A | N/A | 45566 | 45585 | ATGCACTGCTTGCCTGGAGA | 40 | 1361 |
| 874927 | N/A | N/A | 46912 | 46931 | GCAATGAAACTGTTCTATTA | 61 | 1362 |
| 874951 | N/A | N/A | 49059 | 49078 | TCCATCATTTAAAAATCCTC | 37 | 1363 |
| 874975 | N/A | N/A | 51367 | 51386 | AGTAATAAAAATTTAATGAC | 70 | 1364 |
| 874999 | N/A | N/A | 54561 | 54580 | GTTAGCATCAAGAACTTAAA | 30 | 1365 |
| 875023 | N/A | N/A | 56886 | 56905 | TCAAGTGCAGCAATAAAGAC | 78 | 1366 |
| 875047 | N/A | N/A | 58785 | 58804 | TTTTATGCTAGAGGTTTTTA | 92 | 1367 |
| 875071 | N/A | N/A | 61109 | 61128 | ACAATAAAATAAAAATAAAC | 71 | 1368 |
| 875095 | N/A | N/A | 63285 | 63304 | AGATAAAAGGCACTGCAATT | 147 | 1369 |
| 875119 | N/A | N/A | 65276 | 65295 | GAAAAAAAAAATCTACAGTG | 95 | 1370 |
| 875143 | N/A | N/A | 68890 | 68909 | CTGACAAGCAGGAAGAAAGA | 83 | 1371 |
| 875167 | N/A | N/A | 71122 | 71141 | CGTGTATAGCTGGGAGCGGT | 84 | 1372 |
| 875191 | N/A | N/A | 72378 | 72397 | AAAGAATATTAATTTTCCAT | 83 | 1373 |
| 875215 | N/A | N/A | 74178 | 74197 | CCAGCAAATTTAAGCATGGA | 82 | 1374 |
| 875239 | N/A | N/A | 76560 | 76579 | CTCACTACAATAACAACAAC | 98 | 1375 |
| 875263 | N/A | N/A | 78033 | 78052 | GCTTGGAAAGCTGAGGCAGT | 98 | 1376 |
| 875287 | N/A | N/A | 80668 | 80687 | GAAAATGAAGCTTGTTTTTC | 137 | 1377 |
| 875311 | N/A | N/A | 82443 | 82462 | CAATGCCCCAGGGTTTATTC | 80 | 1378 |
| 875335 | N/A | N/A | 84195 | 84214 | CTTTCCAAATTTAAATAGCT | 133 | 1379 |
| 875359 | N/A | N/A | 85140 | 85159 | TTTTAGCATAACTTAACTGA | 133 | 1380 |
| 875383 | N/A | N/A | 87736 | 87755 | CATGATAAAATATTTTTAAC | 97 | 1381 |
| 875407 | N/A | N/A | 90262 | 90281 | AATCATGTTATTCTCAAAAT | 73 | 1382 |
| 875431 | N/A | N/A | 92462 | 92481 | ACACCAGAGTCCAGTACATC | 80 | 1383 |
| 875455 | N/A | N/A | 95328 | 95347 | ATTTTAAAAACCACTGATTT | 73 | 1384 |
| 875479 | N/A | N/A | 97386 | 97405 | AACAAGCATGTGAAGATAAT | 106 | 1385 |
| 875503 | N/A | N/A | 99111 | 99130 | CTCCTGCCTCAGTCTTGCGA | 96 | 1386 |
| 875527 | N/A | N/A | 101077 | 101096 | AATGATTTAAAATAATTTTA | 166 | 1387 |
| 875551 | N/A | N/A | 104161 | 104180 | AACCGAATTCAGTAACACAT | 59 | 1388 |
| 875575 | N/A | N/A | 108060 | 108079 | CAGGAAGAATAAAAAATGAA | 95 | 1389 |
| 875599 | N/A | N/A | 110294 | 110313 | TGCAATTCCTGGACAAGTCA | 69 | 1390 |
| 875623 | N/A | N/A | 112683 | 112702 | CACAGTCACCAAAGCACTCA | 142 | 1391 |
| 875647 | N/A | N/A | 115093 | 115112 | GCCCAAGATCACATCTAATT | 85 | 1392 |
| 875671 | N/A | N/A | 117483 | 117502 | ATAACTGTAGGTATATATAA | 134 | 1393 |
| 875695 | N/A | N/A | 120698 | 120717 | ACAGATAAATTGAACTTCAT | 94 | 1394 |
| 875719 | N/A | N/A | 123938 | 123957 | TACTAAAAGTAGTAACTTTA | 82 | 1395 |
| 875743 | N/A | N/A | 127331 | 127350 | AGGCTGAGGTAGAAAGATAA | 128 | 1396 |
| 875767 | N/A | N/A | 129897 | 129916 | CTCCTTCTGGTAAACAAAAA | 108 | 1397 |
| 875791 | N/A | N/A | 131573 | 131592 | CACACTGGAAGAGACAAACA | 106 | 1398 |
| 875815 | N/A | N/A | 133419 | 133438 | CCGTTAAGACAACTAAAGAC | 101 | 1399 |
| 875839 | N/A | N/A | 135123 | 135142 | AGGTTTTTGACAAAAGCCCT | 104 | 1400 |
| 875863 | N/A | N/A | 137991 | 138010 | TCTCCATGAAGGAGCAACTA | 92 | 1401 |
| 875887 | N/A | N/A | 139982 | 140001 | AGACAAAAAAGGAACCAGGG | 106 | 1402 |
| 875911 | N/A | N/A | 142611 | 142630 | TTCCTTCATATCCAGTTTAG | 114 | 1403 |
| 875935 | N/A | N/A | 144712 | 144731 | GACGGAGTTTCACAGTGTTC | 87 | 1404 |
| 875959 | N/A | N/A | 146275 | 146294 | ACACCTTTCACCTGTAGCAG | 45 | 1405 |
| 875983 | N/A | N/A | 148054 | 148073 | AGCACTGGCCCTGCCTGCCA | 115 | 1406 |

TABLE 20
Percent control of human ATXN2 RNA with 5-10-5 MOE gapmers
with mixed internucleoside linkages

| | SEQ ID | SEQ ID | SEQ ID | SEQ ID | | | |
|---|---|---|---|---|---|---|---|
| | NO: 1 | NO: 1 | NO: 2 | NO: 2 | | | |
| Compound | Start | Stop | Start | Stop | | ATXN2 % | SEQ |
| Number | Site | Site | Site | Site | Sequence (5′ to 3′) | control | ID NO |
| 708199 | 1477 | 1496 | 81637 | 81656 | GCTAACTGGTTTGCCCTTGC | 41 | 32 |
| 874166 | 168 | 187 | 2158 | 2177 | GAGGAGCTGCGGCCGCTGAG | 110 | 1407 |
| 874190 | 368 | 387 | 2358 | 2377 | GTCTGAGGCGGAGGGAGGCG | 91 | 1408 |
| 874214 | 995 | 1014 | 48694 | 48713 | CACTTGTACTTCACATTTGG | 62 | 1409 |
| 874235 | 1535 | 1554 | 81695 | 81714 | ATCATCATTTTCCAGGGCCA | 71 | 1410 |
| 874259 | 1763 | 1782 | 83374 | 83393 | ACCAGAATTCGGGTTGAAAT | 60 | 1411 |
| 874283 | 2464 | 2483 | 91734 | 91753 | CTAGGTGATGTTTCATTGGG | 30 | 1412 |
| 874307 | 2768 | 2787 | 113077 | 113096 | CTTGTGCTCCGTGTTACTAA | 37 | 1413 |
| 874330 | 3493 | 3512 | 136966 | 136985 | CTTGTCTCCTTGTTGTATGG | 45 | 1414 |
| 874353 | 4196 | 4215 | 148947 | 148966 | ATATATATTTTAAAAACAAA | 123 | 1415 |
| 874377 | 4356 | 4375 | 149107 | 149126 | TCCAGTTTCGGCAAGCAGAG | 52 | 1416 |
| 874400 | 4525 | 4544 | 149276 | 149295 | ACGGTAAGAATTTACTGAAA | 90 | 1417 |
| 874424 | 4671 | 4690 | 149422 | 149441 | ACTTTTTTTATTTTTTAAAT | 95 | 1418 |
| 874472 | N/A | N/A | 3567 | 3586 | GAGGCCACATGGAGCCCCAC | 97 | 1419 |
| 874496 | N/A | N/A | 3396 | 3415 | TCCGGAGGAGCCCGGTGCCT | 70 | 1420 |
| 874520 | N/A | N/A | 6521 | 6540 | TTCTTGACACTGGAAGTAAT | 70 | 1421 |
| 874544 | N/A | N/A | 8253 | 8272 | TTGAGATCCTCCTTTAAGTC | 41 | 1422 |
| 874568 | N/A | N/A | 11322 | 11341 | GCCAAAATCAAGGTTACAAA | 36 | 1423 |
| 874592 | N/A | N/A | 14673 | 14692 | ATAAAGAACTCTCCAGACCA | 90 | 1424 |
| 874616 | N/A | N/A | 17714 | 17733 | ATTCAAATTTAACTGAGTGT | 85 | 1425 |
| 874640 | N/A | N/A | 20042 | 20061 | GCATTGGCCTACTCCGTGAA | 45 | 1426 |
| 874664 | N/A | N/A | 22447 | 22466 | AACCAAGAGAAATAAAATCA | 107 | 1427 |
| 874688 | N/A | N/A | 26863 | 26882 | GCTAGTGACTCAAGTTCCTG | 56 | 1428 |
| 874712 | N/A | N/A | 30034 | 30053 | AGTTAATGGGAAACATGATC | 84 | 1429 |
| 874736 | N/A | N/A | 31851 | 31870 | AGGGATAAAAGGCTTGGTCA | 72 | 1430 |
| 874760 | N/A | N/A | 32983 | 33002 | TGAAAGAAGCCTTCTCAAAC | 93 | 1431 |
| 874784 | N/A | N/A | 36387 | 36406 | ATTTTTGACAAGCTGACCGT | 103 | 1432 |
| 874808 | N/A | N/A | 37739 | 37758 | GATCTGTATTATAATTACTA | 79 | 1433 |
| 874832 | N/A | N/A | 40698 | 40717 | CGCCCTGACTCACGCCTGTA | 99 | 1434 |
| 874856 | N/A | N/A | 42555 | 42574 | ATCCAGAATGCAGTAAATGC | 27 | 1435 |
| 874880 | N/A | N/A | 44286 | 44305 | AAACAATGGACTTGAATTAA | 68 | 1436 |
| 874904 | N/A | N/A | 45671 | 45690 | ATTTCCAAACTTAAAATATA | 76 | 1437 |
| 874928 | N/A | N/A | 46982 | 47001 | GATGGAAGACAAATCAATGG | 71 | 1438 |
| 874952 | N/A | N/A | 49152 | 49171 | AGCTCATCAAGGTACCAGTT | 20 | 1439 |
| 874976 | N/A | N/A | 51385 | 51404 | GAAATGAAGATCTAATAAAG | 127 | 1440 |
| 875000 | N/A | N/A | 54588 | 54607 | CTTTTAAACTTTATTGAAAT | 85 | 1441 |
| 875024 | N/A | N/A | 56983 | 57002 | TGAAGGAAAAGAAGCCCAGG | 83 | 1442 |
| 875048 | N/A | N/A | 59243 | 59262 | ATTTTTAGTAGAGCCATGTC | 65 | 1443 |
| 875072 | N/A | N/A | 61124 | 61143 | AATTTCTTTAAAAATACAAT | 91 | 1444 |
| 875096 | N/A | N/A | 63309 | 63328 | TAGTTTGACTAAGCCCATTA | 53 | 1445 |
| 875120 | N/A | N/A | 65378 | 65397 | ACCACACTTATTTTCTATTT | 48 | 1446 |
| 875144 | N/A | N/A | 68973 | 68992 | TCCAAGGTCATCAATGCCCT | 106 | 1447 |
| 875168 | N/A | N/A | 71142 | 71161 | CTGGAGTGGCATTAAAAATA | 85 | 1448 |
| 875192 | N/A | N/A | 72380 | 72399 | TCAAAGAATATTAATTTTCC | 64 | 1449 |
| 875216 | N/A | N/A | 74198 | 74217 | GCCAAAATAAGAAATCTGAG | 55 | 1450 |
| 875240 | N/A | N/A | 76565 | 76584 | ATACACTCACTACAATAACA | 81 | 1451 |
| 875264 | N/A | N/A | 78448 | 78467 | TTGCAGTGTGACAGAGCAAG | 80 | 1452 |
| 875288 | N/A | N/A | 80812 | 80831 | ATCAAAGACAAATGCACTAA | 103 | 1453 |
| 875312 | N/A | N/A | 82491 | 82510 | TTGAACTATTTCAGTGCACT | 79 | 1454 |
| 875336 | N/A | N/A | 84211 | 84230 | CTCTATTTTCATCTAACTTT | 52 | 1455 |
| 875360 | N/A | N/A | 85184 | 85203 | GTACATTTTAACCCTTTGAG | 24 | 1456 |
| 875384 | N/A | N/A | 87737 | 87756 | ACATGATAAAATATTTTTAA | 144 | 1457 |
| 875408 | N/A | N/A | 90294 | 90313 | CTCCAAAACTATGCTTATAC | 60 | 1458 |
| 875432 | N/A | N/A | 92496 | 92515 | TGTGTACAAAGTATAAATCT | 72 | 1459 |
| 875456 | N/A | N/A | 95417 | 95436 | CGACTGCTAAACTGGGCACG | 70 | 1460 |
| 875480 | N/A | N/A | 97390 | 97409 | TTCCAACAAGCATGTGAAGA | 116 | 1461 |
| 875504 | N/A | N/A | 99262 | 99281 | TCCTCTCTGCACTATACTAA | 90 | 1462 |
| 875528 | N/A | N/A | 101138 | 101157 | AATTTAGAAAGAACGAATAA | 92 | 1463 |
| 875552 | N/A | N/A | 104251 | 104270 | TACAAAACCAAAGGACACAT | 102 | 1464 |
| 875576 | N/A | N/A | 108123 | 108142 | AGAAAAATACAGAATATTGT | 100 | 1465 |
| 875600 | N/A | N/A | 110667 | 110686 | GGCACTATGGTCTGTAATCC | 73 | 1466 |
| 875624 | N/A | N/A | 112840 | 112859 | ATATCTTAAATAACTTTAGT | 89 | 1467 |
| 875648 | N/A | N/A | 115157 | 115176 | ATAAACCTGACAGCCTAGCT | 85 | 1468 |
| 875672 | N/A | N/A | 117704 | 117723 | GGCTAAGATTTCTATTTTTT | 62 | 1469 |
| 875696 | N/A | N/A | 120718 | 120737 | AGCAACAAAAGAAAAAACAA | 86 | 1470 |
| 875720 | N/A | N/A | 124032 | 124051 | GGCTCTTCAAAAAAAACCGC | 96 | 1471 |
| 875744 | N/A | N/A | 127393 | 127412 | CTGGGTGTGATGGCTCATCC | 106 | 1472 |
| 875768 | N/A | N/A | 129900 | 129919 | CACCTCCTTCTGGTAAACAA | 87 | 1473 |
| 875792 | N/A | N/A | 131617 | 131636 | TAGATAGAGTATGTTTTCAG | 52 | 1474 |
| 875816 | N/A | N/A | 133430 | 133449 | ATATTCAGTCCCCGTTAAGA | 68 | 1475 |
| 875840 | N/A | N/A | 136211 | 136230 | GGTAAAAGCATCACCATAAA | 43 | 1476 |
| 875864 | N/A | N/A | 137994 | 138013 | CTTTCTCCATGAAGGAGCAA | 157 | 1477 |
| 875888 | N/A | N/A | 140040 | 140059 | AAGCAGGGTAGGAAGAAAAT | 106 | 1478 |
| 875912 | N/A | N/A | 142660 | 142679 | TCTAGGATCACCTGTGCATC | 60 | 1479 |
| 875936 | N/A | N/A | 144926 | 144945 | TCAACATGTATCTTAAATGT | 79 | 1480 |
| 875960 | N/A | N/A | 146301 | 146320 | AGACAGCAACCACTGAGATG | 93 | 1481 |
| 875984 | N/A | N/A | 148158 | 148177 | CTCGGCTCCCGGAAGCCTCA | 79 | 1482 |

TABLE 21
Percent control of human ATXN2 RNA with 5-10-5 MOE gapmers
with mixed internucleoside linkages

| | SEQ ID | SEQ ID | SEQ ID | SEQ ID | | | |
|---|---|---|---|---|---|---|---|
| | NO: 1 | NO: 1 | NO: 2 | NO: 2 | | | |
| Compound | Start | Stop | Start | Stop | | ATXN2 % | SEQ |
| Number | Site | Site | Site | Site | Sequence (5′ to 3′) | control | ID NO |
| 708199 | 1477 | 1496 | 81637 | 81656 | GCTAACTGGTTTGCCCTTGC | 34 | 32 |
| 874167 | 173 | 192 | 2163 | 2182 | ACTCCGAGGAGCTGCGGCCG | 100 | 1483 |
| 874191 | 373 | 392 | 2363 | 2382 | AAACAGTCTGAGGCGGAGGG | 83 | 1484 |
| 874215 | 1077 | 1096 | 49251 | 49270 | TTTTCTCATGTGCGGCATCA | 49 | 1485 |
| 874236 | 1536 | 1555 | 81696 | 81715 | TATCATCATTTTCCAGGGCC | 60 | 1486 |
| 874260 | 1764 | 1783 | 83375 | 83394 | AACCAGAATTCGGGTTGAAA | 58 | 1487 |
| 874284 | 2465 | 2484 | 91735 | 91754 | GCTAGGTGATGTTTCATTGG | 50 | 1488 |
| 874308 | 2806 | 2825 | 113115 | 113134 | GAAGTCTGAACCCCTTGGGA | 104 | 1489 |
| 874331 | 3940 | 3959 | 147855 | 147874 | ATTGGCGCATGGGCAGTTGG | 62 | 1490 |
| 874354 | 4201 | 4220 | 148952 | 148971 | TCAACATATATATTTTAAAA | 104 | 1491 |
| 874378 | 4361 | 4380 | 149112 | 149131 | TAACTTCCAGTTTCGGCAAG | 47 | 1492 |
| 874401 | 4530 | 4549 | 149281 | 149300 | GTTTGACGGTAAGAATTTAC | 86 | 1493 |
| 874425 | 4679 | 4698 | 149430 | 149449 | TTTTTAAAACTTTTTTTATT | 87 | 1494 |
| 874473 | N/A | N/A | 3572 | 3591 | TGCCGGAGGCCACATGGAGC | 93 | 1495 |
| 874497 | N/A | N/A | 3410 | 3429 | CAGACCCTGATGATTCCGGA | 56 | 1496 |
| 874521 | N/A | N/A | 6751 | 6770 | AACCAAGTACCCTCATTAAT | 110 | 1497 |
| 874545 | N/A | N/A | 8481 | 8500 | CCGCACTCATTGCAACCTCC | 100 | 1498 |
| 874569 | N/A | N/A | 11435 | 11454 | CAAAATAAATAAATAACCAA | 90 | 1499 |
| 874593 | N/A | N/A | 14692 | 14711 | AAAAGTTCTCAAAGAGGCCA | 72 | 1500 |
| 874617 | N/A | N/A | 17725 | 17744 | GTTCATCAAAAATTCAAATT | 140 | 1501 |
| 874641 | N/A | N/A | 20069 | 20088 | ATGAACTCCTGCTGCCTGGG | 55 | 1502 |
| 874665 | N/A | N/A | 22469 | 22488 | CAATCTCATTTCTATGCATT | 53 | 1503 |
| 874689 | N/A | N/A | 27130 | 27149 | CCTGGGTTTAAGTGACCCTC | 88 | 1504 |
| 874713 | N/A | N/A | 30201 | 30220 | TTAGTTTCATGGAAAATTTG | 78 | 1505 |
| 874737 | N/A | N/A | 31871 | 31890 | CCTTGAGTCCCTCTAGAGAA | 81 | 1506 |
| 874761 | N/A | N/A | 32994 | 33013 | ATGTCACCTCCTGAAAGAAG | 54 | 1507 |
| 874785 | N/A | N/A | 36430 | 36449 | TCATTTTATTCTGCTTTGCT | 34 | 1508 |
| 874809 | N/A | N/A | 37849 | 37868 | AATAATACTTAATCCTACTC | 87 | 1509 |
| 874833 | N/A | N/A | 40743 | 40762 | AGAAAACCATAATTAATGCA | 99 | 1510 |
| 874857 | N/A | N/A | 42595 | 42614 | GAATATATTAACTGATACCA | 50 | 1511 |
| 874881 | N/A | N/A | 44316 | 44335 | ACTTTTCCTCACTTTCTTCT | 95 | 1512 |
| 874905 | N/A | N/A | 45694 | 45713 | ACAGGCTAAATAAGCTGAAA | 93 | 1513 |
| 874929 | N/A | N/A | 47002 | 47021 | GGAAGGACACAAACCGTAAG | 62 | 1514 |
| 874953 | N/A | N/A | 49157 | 49176 | TCTTTAGCTCATCAAGGTAC | 75 | 1515 |
| 874977 | N/A | N/A | 51885 | 51904 | GTTTTGAAATAAGATACCTG | 78 | 1516 |
| 875001 | N/A | N/A | 54602 | 54621 | ATGCATGAATATAACTTTTA | 68 | 1517 |
| 875025 | N/A | N/A | 57059 | 57078 | AGCTGGCAGTGTGTGTCATG | 79 | 1518 |
| 875049 | N/A | N/A | 59277 | 59296 | CAGGTGCCCGTCACCTCGCC | 87 | 1519 |
| 875073 | N/A | N/A | 61226 | 61245 | TGTTTTGCAACTCCCTCAGT | 93 | 1520 |
| 875097 | N/A | N/A | 63380 | 63399 | GTGAGAGGTACAAATTGGAT | 58 | 1521 |
| 875121 | N/A | N/A | 65409 | 65428 | ACAATATTTGCCTTGGTGGA | 74 | 1522 |
| 875145 | N/A | N/A | 68996 | 69015 | ATAAAGATGTAAATTTCTCT | 96 | 1523 |
| 875169 | N/A | N/A | 71146 | 71165 | TAGACTGGAGTGGCATTAAA | 103 | 1524 |
| 875193 | N/A | N/A | 72393 | 72412 | CCAATGCCATAAGTCAAAGA | 130 | 1525 |
| 875217 | N/A | N/A | 74384 | 74403 | CTCTGCTGAGGAATATAAGC | 129 | 1526 |
| 875241 | N/A | N/A | 76650 | 76669 | CCCCTACAAGTAAAATGACA | 122 | 1527 |
| 875265 | N/A | N/A | 78696 | 78715 | GGCAATAAGAATATGAACAG | 66 | 1528 |
| 875289 | N/A | N/A | 80842 | 80861 | ATTTATTCATCATAAATTAA | 103 | 1529 |
| 875313 | N/A | N/A | 82494 | 82513 | CAGTTGAACTATTTCAGTGC | 54 | 1530 |
| 875337 | N/A | N/A | 84223 | 84242 | AAACTTAGTGTTCTCTATTT | 88 | 1531 |
| 875361 | N/A | N/A | 85272 | 85291 | ATGATATGAAGGAAAGTATA | 84 | 1532 |
| 875385 | N/A | N/A | 87771 | 87790 | TTTGTAAAGAAATATGTTAC | 85 | 1533 |
| 875409 | N/A | N/A | 90317 | 90336 | CTATAATGCTATTCTGAGTG | 54 | 1534 |
| 875433 | N/A | N/A | 92571 | 92590 | AAGGAGAGATGTTAAGTAAA | 73 | 1535 |
| 875457 | N/A | N/A | 95441 | 95460 | GAAGGGCTGGAGGCAAATGT | 83 | 1536 |
| 875481 | N/A | N/A | 97406 | 97425 | TTTGTAGTCAACAGACTTCC | 89 | 1537 |
| 875505 | N/A | N/A | 99283 | 99302 | AATATAGCACTCTGCTGTAT | 109 | 1538 |
| | | | 99341 | 99360 | | | |
| 875529 | N/A | N/A | 101178 | 101197 | GGAGAAGAAGGGAAATGAGG | 87 | 1539 |
| 875553 | N/A | N/A | 104262 | 104281 | CTATTACCCTATACAAAACC | 82 | 1540 |
| 875577 | N/A | N/A | 108143 | 108162 | CTCACTGGTAACAAGTACAC | 66 | 1541 |
| 875601 | N/A | N/A | 110953 | 110972 | AAGGAAAAAGACACCAAAAA | 135 | 1542 |
| 875625 | N/A | N/A | 112860 | 112879 | AAGGAAACAATTATACTTAA | 83 | 1543 |
| 875649 | N/A | N/A | 115236 | 115255 | AGATTATCCTAACTATGTTT | 90 | 1544 |
| 875673 | N/A | N/A | 117770 | 117789 | TTTCAATTGATCCTCCCACC | 133 | 1545 |
| 875697 | N/A | N/A | 120786 | 120805 | TTCATAGGAGTAAATCTCTG | 53 | 1546 |
| 875721 | N/A | N/A | 124051 | 124070 | CATTAAAATTAACAATACTG | 128 | 1547 |
| 875745 | N/A | N/A | 127761 | 127780 | GTGGGAAAAAAATACAAGAC | 72 | 1548 |
| 875769 | N/A | N/A | 129981 | 130000 | GTTACATATTATTTTATCTA | 91 | 1549 |
| 875793 | N/A | N/A | 131634 | 131653 | AAAGGTCAGGTTATTCTTAG | 46 | 1550 |
| 875817 | N/A | N/A | 133534 | 133553 | CATAATGAACTTTTAACCTA | 65 | 1551 |
| 875841 | N/A | N/A | 136265 | 136284 | TCTTCCTAATGGCTCTAGTT | 60 | 1552 |
| 875865 | N/A | N/A | 138252 | 138271 | GGAACTCTTGTGCCTCCGCC | 87 | 1553 |
| 875889 | N/A | N/A | 140074 | 140093 | TTCCTTGATAGGCCAGTTAA | 72 | 1554 |
| 875913 | N/A | N/A | 142681 | 142700 | AGGGCAAGGCAAAGAGCCAG | 165 | 1555 |
| 875937 | N/A | N/A | 144941 | 144960 | CCAATCACCTTATTATCAAC | 60 | 1556 |
| 875961 | N/A | N/A | 146302 | 146321 | CAGACAGCAACCACTGAGAT | 71 | 1557 |
| 875985 | N/A | N/A | 148184 | 148203 | CTGTATACCATCAGAACACA | 81 | 1558 |

TABLE 22
Percent control of human ATXN2 RNA with 5-10-5 MOE gapmers
with mixed internucleoside linkages

| | SEQ ID | SEQ ID | SEQ ID | SEQ ID | | | |
|---|---|---|---|---|---|---|---|
| | NO: 1 | NO: 1 | NO: 2 | NO: 2 | | | |
| Compound | Start | Stop | Start | Stop | | ATXN2 % | SEQ |
| Number | Site | Site | Site | Site | Sequence (5′ to 3′) | control | ID NO |
| 708199 | 1477 | 1496 | 81637 | 81656 | GCTAACTGGTTTGCCCTTGC | 33 | 32 |
| 874168 | 178 | 197 | 2168 | 2187 | GCGGGACTCCGAGGAGCTGC | 163 | 1559 |
| 874192 | 378 | 397 | 2368 | 2387 | TACCAAAACAGTCTGAGGCG | 74 | 1560 |
| 874216 | 1079 | 1098 | 49253 | 49272 | ACTTTTCTCATGTGCGGCAT | 31 | 1561 |
| 874237 | 1537 | 1556 | 81697 | 81716 | CTATCATCATTTTCCAGGGC | 42 | 1562 |
| 874261 | 1766 | 1785 | 83377 | 83396 | TGAACCAGAATTCGGGTTGA | 73 | 1563 |
| 874285 | 2466 | 2485 | 91736 | 91755 | AGCTAGGTGATGTTTCATTG | 62 | 1564 |
| 874309 | 2808 | 2827 | 113117 | 113136 | TGGAAGTCTGAACCCCTTGG | 68 | 1565 |
| 874332 | 3942 | 3961 | 147857 | 147876 | TCATTGGCGCATGGGCAGTT | 79 | 1566 |
| 874355 | 4206 | 4225 | 148957 | 148976 | AGAAATCAACATATATATTT | 67 | 1567 |
| 874379 | 4372 | 4391 | 149123 | 149142 | TAAAAAATAAATAACTTCCA | 106 | 1568 |
| 874402 | 4535 | 4554 | 149286 | 149305 | CGTCAGTTTGACGGTAAGAA | 81 | 1569 |
| 874426 | 4684 | 4703 | N/A | N/A | TTCAGTTTTTAAAACTTTTT | 79 | 1570 |
| 874474 | N/A | N/A | 3606 | 3625 | CCTTCCCTTCCCCAGGTGGG | 101 | 1571 |
| 874498 | N/A | N/A | 3852 | 3871 | CTCCTAGCATTTCCGAAATT | 88 | 1572 |
| 874522 | N/A | N/A | 6805 | 6824 | TTCCTCAGGAATTTCATTCC | 89 | 1573 |
| 874546 | N/A | N/A | 8491 | 8510 | ACTGCAACCTCCGCACTCAT | 97 | 1574 |
| 874570 | N/A | N/A | 11884 | 11903 | AAAAATTTTGCTGGGCATAG | 70 | 1575 |
| 874594 | N/A | N/A | 14775 | 14794 | ATCTGCCTCTGAAAACATTG | 51 | 1576 |
| 874618 | N/A | N/A | 17808 | 17827 | GATGCTCAGTTAAATTTCAA | 90 | 1577 |
| 874642 | N/A | N/A | 20074 | 20093 | ACTTCATGAACTCCTGCTGC | 73 | 1578 |
| 874666 | N/A | N/A | 22506 | 22525 | GTACCCTGGAAAAATAAACA | 88 | 1579 |
| 874690 | N/A | N/A | 27138 | 27157 | CTCCAATTCCTGGGTTTAAG | 89 | 1580 |
| 874714 | N/A | N/A | 30240 | 30259 | ACAAAGTTAAGTTCTACAGG | 62 | 1581 |
| 874738 | N/A | N/A | 31884 | 31903 | CAGTGCCTTTACCCCTTGAG | 22 | 1582 |
| 874762 | N/A | N/A | 33100 | 33119 | CATAAGGGTACCACATACCT | 66 | 1583 |
| 874786 | N/A | N/A | 36460 | 36479 | GTGTACATGTGATGGCAATA | 63 | 1584 |
| 874810 | N/A | N/A | 37868 | 37887 | TCCAAGGCATTTTTTAAATA | 77 | 1585 |
| 874834 | N/A | N/A | 40754 | 40773 | TTAAGAACGAAAGAAAACCA | 121 | 1586 |
| 874858 | N/A | N/A | 42680 | 42699 | CACCTTCTGCTTCTGATGTG | 51 | 1587 |
| 874882 | N/A | N/A | 44355 | 44374 | CATTCTGAGGCCAGTCCTAG | 78 | 1588 |
| 874906 | N/A | N/A | 45805 | 45824 | CTACTAATTTTCCCCAATAA | 111 | 1589 |
| 874930 | N/A | N/A | 47049 | 47068 | TTGACTAAACATGACATAAA | 118 | 1590 |
| 874954 | N/A | N/A | 49184 | 49203 | CTTTACAAAATAAAATTTGT | 81 | 1591 |
| 874978 | N/A | N/A | 51901 | 51920 | CACTAAACCACTGTAAGTTT | 81 | 1592 |
| 875002 | N/A | N/A | 54673 | 54692 | GAGACCAAAGGAAACTTATT | 121 | 1593 |
| 875026 | N/A | N/A | 57092 | 57111 | TACACACATGATAGGAGGGA | 43 | 1594 |
| 875050 | N/A | N/A | 59367 | 59386 | AGTGCAGCACCACCATCTCG | 90 | 1595 |
| 875074 | N/A | N/A | 61380 | 61399 | GATAGTAAGTATATTAGCAT | 91 | 1596 |
| 875098 | N/A | N/A | 63430 | 63449 | TTTAAGTAATAAAAAGCAGT | 81 | 1597 |
| 875122 | N/A | N/A | 65449 | 65468 | AAATGAGAAATCTGGAAGAC | 76 | 1598 |
| 875146 | N/A | N/A | 69021 | 69040 | AAATTTCACTTGAAGGTTAG | 70 | 1599 |
| 875170 | N/A | N/A | 71153 | 71172 | TCCAACATAGACTGGAGTGG | 86 | 1600 |
| 875194 | N/A | N/A | 72435 | 72454 | TCTAATCTACAGGCAACTGT | 101 | 1601 |
| 875218 | N/A | N/A | 74386 | 74405 | GGCTCTGCTGAGGAATATAA | 145 | 1602 |
| 875242 | N/A | N/A | 76793 | 76812 | CTTATTTGGCTGGGTGTTAA | 70 | 1603 |
| 875266 | N/A | N/A | 79338 | 79357 | AACTACTATTAAGAGTTCTG | 66 | 1604 |
| 875290 | N/A | N/A | 80898 | 80917 | TTGGTAATAAGAGAAAAATT | 97 | 1605 |
| 875314 | N/A | N/A | 82601 | 82620 | AACTTGCTCCATGTTTCCTC | 51 | 1606 |
| 875338 | N/A | N/A | 84232 | 84251 | TGAAATTGGAAACTTAGTGT | 62 | 1607 |
| 875362 | N/A | N/A | 85722 | 85741 | GATAAACCCCCTTTTTAACA | 106 | 1608 |
| 875386 | N/A | N/A | 87885 | 87904 | TTATTATTTCCCTTTATTTT | 138 | 1609 |
| 875410 | N/A | N/A | 90318 | 90337 | TCTATAATGCTATTCTGAGT | 60 | 1610 |
| 875434 | N/A | N/A | 92599 | 92618 | TAACATGCAAAAGAATGAAA | 83 | 1611 |
| 875458 | N/A | N/A | 95478 | 95497 | GATTAACGGTTGCTTAGGGT | 10 | 1612 |
| 875482 | N/A | N/A | 97440 | 97459 | AGGACAATTCAGAGTCCAGT | 75 | 1613 |
| 875506 | N/A | N/A | 99284 | 99303 | GAATATAGCACTCTGCTGTA | 58 | 1614 |
| | | | 99342 | 99361 | | | |
| 875530 | N/A | N/A | 101219 | 101238 | GAGATAGCAGAATGGTTACC | 112 | 1615 |
| 875554 | N/A | N/A | 104868 | 104887 | AAAAAAGTGGAAAAACTTCA | 88 | 1616 |
| 875578 | N/A | N/A | 108258 | 108277 | AGGCTGGTAACAGAGCATGA | 81 | 1617 |
| 875602 | N/A | N/A | 110997 | 111016 | AAAATTAGGTAAGCGATCAC | 72 | 1618 |
| 875626 | N/A | N/A | 112866 | 112885 | TAAATAAAGGAAACAATTAT | 111 | 1619 |
| 875650 | N/A | N/A | 115247 | 115266 | GTGTTCAGTATAGATTATCC | 28 | 1620 |
| 875674 | N/A | N/A | 117793 | 117812 | TCCCTGCAGCCTGGACCTTC | 87 | 1621 |
| 875698 | N/A | N/A | 120810 | 120829 | AAATCATAGGAGTTTTATAG | 102 | 1622 |
| 875722 | N/A | N/A | 124664 | 124683 | CAAAGATCAATACAACAAAA | 91 | 1623 |
| 875746 | N/A | N/A | 127802 | 127821 | TTAAATATCAACACAGGGAT | 73 | 1624 |
| 875770 | N/A | N/A | 129995 | 130014 | ATTTGGGAGAGCTAGTTACA | 67 | 1625 |
| 875794 | N/A | N/A | 131763 | 131782 | TAGTTAAAGCAGGAAAGAGA | 108 | 1626 |
| 875818 | N/A | N/A | 133541 | 133560 | AAACAATCATAATGAACTTT | 112 | 1627 |
| 875842 | N/A | N/A | 136401 | 136420 | AAAATGTTAAAAGGCAGTTG | 69 | 1628 |
| 875866 | N/A | N/A | 138269 | 138288 | CCACCTCCAGGGTTCATGGA | 83 | 1629 |
| 875890 | N/A | N/A | 140774 | 140793 | TAATCTATAGCTAATTTGCA | 80 | 1630 |
| 875914 | N/A | N/A | 142798 | 142817 | TTAGGCTAGGCACATGGAGC | 33 | 1631 |
| 875938 | N/A | N/A | 144978 | 144997 | ATTTGATTTTTCATTACTGC | 57 | 1632 |
| 875962 | N/A | N/A | 146349 | 146368 | CAATCCCCTGGGCCCTGGAG | 127 | 1633 |
| 875986 | N/A | N/A | 148191 | 148210 | CCAAATCCTGTATACCATCA | 61 | 1634 |

TABLE 23
Percent control of human ATXN2 RNA with 5-10-5 MOE gapmers
with mixed internucleoside linkages

| | SEQ ID | SEQ ID | SEQ ID | SEQ ID | | | |
|---|---|---|---|---|---|---|---|
| | NO: 1 | NO: 1 | NO: 2 | NO: 2 | | | |
| Compound | Start | Stop | Start | Stop | | ATXN2 % | SEQ |
| Number | Site | Site | Site | Site | Sequence (5′ to 3′) | control | ID NO |
| 708199 | 1477 | 1496 | 81637 | 81656 | GCTAACTGGTTTGCCCTTGC | 37 | 32 |
| 874169 | 183 | 202 | 2173 | 2192 | CCACCGCGGGACTCCGAGGA | 151 | 1635 |
| 874193 | 383 | 402 | 2373 | 2392 | GTTGCTACCAAAACAGTCTG | 94 | 1636 |
| 874217 | 1080 | 1099 | 49254 | 49273 | TACTTTTCTCATGTGCGGCA | 24 | 1637 |
| 874238 | 1539 | 1558 | 81699 | 81718 | TCCTATCATCATTTTCCAGG | 36 | 1638 |
| 874262 | 1767 | 1786 | 83378 | 83397 | CTGAACCAGAATTCGGGTTG | 100 | 1639 |
| 874286 | 2468 | 2487 | 91738 | 91757 | GAAGCTAGGTGATGTTTCAT | 89 | 1640 |
| 874310 | 2809 | 2828 | 113118 | 113137 | CTGGAAGTCTGAACCCCTTG | 70 | 1641 |
| 874333 | 3943 | 3962 | 147858 | 147877 | ATCATTGGCGCATGGGCAGT | 65 | 1642 |
| 874356 | 4211 | 4230 | 148962 | 148981 | TTACAAGAAATCAACATATA | 110 | 1643 |
| 874380 | 4377 | 4396 | 149128 | 149147 | GTTATTAAAAAATAAATAAC | 110 | 1644 |
| 874403 | 4540 | 4559 | 149291 | 149310 | TAATCCGTCAGTTTGACGGT | 80 | 1645 |
| 874427 | 4689 | 4708 | N/A | N/A | TTTTTTTCAGTTTTTAAAAC | 91 | 1646 |
| 874475 | N/A | N/A | 3611 | 3630 | CCACCCCTTCCCTTCCCCAG | 103 | 1647 |
| 874499 | N/A | N/A | 3916 | 3935 | CGCTAGTAAACACCCGCCTT | 69 | 1648 |
| 874523 | N/A | N/A | 7056 | 7075 | CCTGTATCCCAAGCAATTCT | 51 | 1649 |
| 874547 | N/A | N/A | 8814 | 8833 | TTACATCTCCGTTGAAGTTG | 28 | 1650 |
| 874571 | N/A | N/A | 11970 | 11989 | ATGAGAATCATTTGAACGCA | 36 | 1651 |
| 874595 | N/A | N/A | 14959 | 14978 | TTTCTGTTTTTCAGTAGAGA | 70 | 1652 |
| 874619 | N/A | N/A | 17836 | 17855 | TAGACTGGAGTTGCCAGATA | 87 | 1653 |
| 874643 | N/A | N/A | 20097 | 20116 | CGTCTGGTCCCTGTTCAACA | 36 | 1654 |
| 874667 | N/A | N/A | 23044 | 23063 | ATCACCGAAAAAATTTCTCA | 111 | 1655 |
| 874691 | N/A | N/A | 27274 | 27293 | CTAAATTCCCTGAATTCCGT | 74 | 1656 |
| 874715 | N/A | N/A | 30281 | 30300 | ATAGTAAGCTACTACTGAAT | 82 | 1657 |
| 874739 | N/A | N/A | 32055 | 32074 | TACAGTTCCAGTTACTTGGG | 54 | 1658 |
| 874763 | N/A | N/A | 33174 | 33193 | TATAATCAAAATATTTCATT | 84 | 1659 |
| 874787 | N/A | N/A | 36472 | 36491 | CGTATTTTACTAGTGTACAT | 67 | 1660 |
| 874811 | N/A | N/A | 37919 | 37938 | TTAATTGGAGACTATAAGTG | 110 | 1661 |
| 874835 | N/A | N/A | 40848 | 40867 | ACCCACTGGAAAAAGAAGTA | 126 | 1662 |
| 874859 | N/A | N/A | 42797 | 42816 | TAAATCAAACAAGAATGGTA | 88 | 1663 |
| 874883 | N/A | N/A | 44372 | 44391 | TAGAAGAGTACTCTTAACAT | 103 | 1664 |
| 874907 | N/A | N/A | 45893 | 45912 | TTAAACAGTCAAGTTATCTA | 70 | 1665 |
| 874931 | N/A | N/A | 47058 | 47077 | AATGGTGTTTTGACTAAACA | 75 | 1666 |
| 874955 | N/A | N/A | 49371 | 49390 | CACCTCTTTTTGCATAACTG | 50 | 1667 |
| 874979 | N/A | N/A | 51931 | 51950 | ATACTACGCACTGGACGCAA | 97 | 1668 |
| 875003 | N/A | N/A | 54952 | 54971 | ATCAAGTAAAAAACAAGCAG | 82 | 1669 |
| 875027 | N/A | N/A | 57111 | 57130 | CATGGTATAAGGGCAATGAT | 102 | 1670 |
| 875051 | N/A | N/A | 59425 | 59444 | CATGTCCTATGCTTATTTTT | 105 | 1671 |
| 875075 | N/A | N/A | 61670 | 61689 | AATTCCAATTCTTACAGCTG | 57 | 1672 |
| 875099 | N/A | N/A | 63477 | 63496 | AGTGAGATAAAATAGAAAAA | 98 | 1673 |
| 875123 | N/A | N/A | 65509 | 65528 | GATGATCTAATAAAAGCAAT | 81 | 1674 |
| 875147 | N/A | N/A | 69082 | 69101 | ATAAATACTGCTAATACTAC | 94 | 1675 |
| 875171 | N/A | N/A | 71209 | 71228 | CTGATCTAGGCCTTCAAGAA | 109 | 1676 |
| 875195 | N/A | N/A | 72501 | 72520 | TGTTGGTAGTAAATAGTACA | 104 | 1677 |
| 875219 | N/A | N/A | 74397 | 74416 | TCTGCTGATCTGGCTCTGCT | 125 | 1678 |
| 875243 | N/A | N/A | 76838 | 76857 | CTCTAGGTGAAGTCAACAAT | 72 | 1679 |
| 875267 | N/A | N/A | 79378 | 79397 | AGTAAAAAGTAAATGTCTTC | 92 | 1680 |
| 875291 | N/A | N/A | 81016 | 81035 | ACAGCGAGATTCCCTCTCAA | 75 | 1681 |
| 875315 | N/A | N/A | 82626 | 82645 | AACGGAGTCACTGTTTTTCC | 45 | 1682 |
| 875339 | N/A | N/A | 84273 | 84292 | TTTGGAGAGGAATTCTGGAG | 120 | 1683 |
| 875363 | N/A | N/A | 85730 | 85749 | CAGGCAGAGATAAACCCCCT | 70 | 1684 |
| 875387 | N/A | N/A | 88403 | 88422 | ATTTTTAACATATACATACT | 102 | 1685 |
| 875411 | N/A | N/A | 90320 | 90339 | AATCTATAATGCTATTCTGA | 78 | 1686 |
| 875435 | N/A | N/A | 92716 | 92735 | CCTTTAATTCAGCTACTTTT | 63 | 1687 |
| 875459 | N/A | N/A | 95503 | 95522 | AGCCCATCCATAGAGACAGA | 130 | 1688 |
| 875483 | N/A | N/A | 97464 | 97483 | GGATAAGACATAGAGATTCA | 82 | 1689 |
| 875507 | N/A | N/A | 99309 | 99328 | TTCTAATGCTATATTGCTAT | 129 | 1690 |
| 875531 | N/A | N/A | 101479 | 101498 | TACGGCACTATATACACAAC | 60 | 1691 |
| 875555 | N/A | N/A | 104920 | 104939 | TACAGTAAAAGCAACAATAA | 123 | 1692 |
| 875579 | N/A | N/A | 108451 | 108470 | TCACCCTGAGGTCAGGAGCT | 131 | 1693 |
| 875603 | N/A | N/A | 111034 | 111053 | CAACTATCCACACAAGAAAG | 95 | 1694 |
| 875627 | N/A | N/A | 112878 | 112897 | CTTGGCTGTAACTAAATAAA | 81 | 1695 |
| 875651 | N/A | N/A | 115321 | 115340 | TTATTTATAATACCTAAAAC | 91 | 1696 |
| 875675 | N/A | N/A | 117891 | 117910 | CTCCCTAATTTTAATGCAGA | 75 | 1697 |
| 875699 | N/A | N/A | 120877 | 120896 | CTCATCTCATACACAAAAAT | 158 | 1698 |
| 875723 | N/A | N/A | 124851 | 124870 | TATTTCTCCCAGAACTGATA | 94 | 1699 |
| 875747 | N/A | N/A | 127963 | 127982 | CTCACTGACTACTCCTATCA | 90 | 1700 |
| 875771 | N/A | N/A | 130056 | 130075 | AAGAACTGATTATATAATTA | 82 | 1701 |
| 875795 | N/A | N/A | 131935 | 131954 | AAGTAGTGAAGCAAAATGTT | 68 | 1702 |
| 875819 | N/A | N/A | 133588 | 133607 | ATGTTCTTTCCACTTGTTAA | 68 | 1703 |
| 875843 | N/A | N/A | 136489 | 136508 | ACATGAATATTATTTCTTAT | 116 | 1704 |
| 875867 | N/A | N/A | 138357 | 138376 | CCTTATTTTTATTTTTTATT | 138 | 1705 |
| 875891 | N/A | N/A | 140799 | 140818 | ATTTAAAGACTATAATACGG | 77 | 1706 |
| 875915 | N/A | N/A | 142869 | 142888 | GGTAGGCAAGGCTGCCGAGT | 83 | 1707 |
| 875939 | N/A | N/A | 145137 | 145156 | TACTGCCCCAGGGAACTGAT | 81 | 1708 |
| 875963 | N/A | N/A | 146696 | 146715 | AAAGCAAATCAACTGCAGTG | 72 | 1709 |
| 875987 | N/A | N/A | 148256 | 148275 | GAAGGCCAACTGAGTCCTAG | 77 | 1710 |

TABLE 24
Percent control of human ATXN2 RNA with 5-10-5 MOE gapmers
with mixed internucleoside linkages

| | SEQ ID | SEQ ID | SEQ ID | SEQ ID | | | |
|---|---|---|---|---|---|---|---|
| | NO: 1 | NO: 1 | NO: 2 | NO: 2 | | | |
| Compound | Start | Stop | Start | Stop | | ATXN2 % | SEQ |
| Number | Site | Site | Site | Site | Sequence (5′ to 3′) | control | ID NO |
| 708199 | 1477 | 1496 | 81637 | 81656 | GCTAACTGGTTTGCCCTTGC | 31 | 32 |
| 708439 | 3944 | 3963 | 147859 | 147878 | CATCATTGGCGCATGGGCAG | 99 | 1711 |
| 874170 | 188 | 207 | 2178 | 2197 | GGTGGCCACCGCGGGACTCC | 87 | 1712 |
| 874194 | 397 | 416 | 2387 | 2406 | CCGCCGCCGTTGCCGTTGCT | 83 | 1713 |
| 874218 | 1081 | 1100 | 49255 | 49274 | GTACTTTTCTCATGTGCGGC | 42 | 1714 |
| 874239 | 1540 | 1559 | 81700 | 81719 | CTCCTATCATCATTTTCCAG | 65 | 1715 |
| 874263 | 1768 | 1787 | 83379 | 83398 | TCTGAACCAGAATTCGGGTT | 92 | 1716 |
| 874287 | 2662 | 2681 | 112971 | 112990 | GCACTTGGTTCAATTTTGTC | 53 | 1717 |
| 874311 | 2810 | 2829 | 113119 | 113138 | GCTGGAAGTCTGAACCCCTT | 47 | 1718 |
| 874357 | 4216 | 4235 | 148967 | 148986 | GGATGTTACAAGAAATCAAC | 43 | 1719 |
| 874381 | 4382 | 4401 | 149133 | 149152 | CAAGGGTTATTAAAAAATAA | 85 | 1720 |
| 874404 | 4545 | 4564 | 149296 | 149315 | AATAATAATCCGTCAGTTTG | 117 | 1721 |
| 874476 | N/A | N/A | 3616 | 3635 | ACTCCCCACCCCTTCCCTTC | 84 | 1722 |
| 874500 | N/A | N/A | 3958 | 3977 | CCCCCAGCCCCTACTACAAC | 96 | 1723 |
| 874524 | N/A | N/A | 7091 | 7110 | ATCACTAAAAGAAAAATATT | 87 | 1724 |
| 874548 | N/A | N/A | 8823 | 8842 | ATAAACTGTTTACATCTCCG | 29 | 1725 |
| 874572 | N/A | N/A | 12217 | 12236 | AAGGCCATCCTGGGCAACAG | 79 | 1726 |
| 874596 | N/A | N/A | 15407 | 15426 | GAGTCTCACTCTGCTCTGTG | 64 | 1727 |
| 874620 | N/A | N/A | 17861 | 17880 | AAAACAGTGAACCATGATTC | 56 | 1728 |
| 874644 | N/A | N/A | 20157 | 20176 | TGCTCCCCCAATGTCCACCG | 90 | 1729 |
| 874668 | N/A | N/A | 23193 | 23212 | TTATGTTACATCTGCCAACA | 60 | 1730 |
| 874692 | N/A | N/A | 27712 | 27731 | TTTTCTGAAATGTTTTATAT | 126 | 1731 |
| 874716 | N/A | N/A | 30303 | 30322 | AATCTTTTTATTCTTGTAAT | 54 | 1732 |
| 874740 | N/A | N/A | 32095 | 32114 | AGAAAGTTTTAAAAATTAGG | 82 | 1733 |
| 874764 | N/A | N/A | 33231 | 33250 | TGTCCTTCAGTAGTTTCTAA | 38 | 1734 |
| 874788 | N/A | N/A | 36528 | 36547 | TTTAAGTAATGCTTTATATT | 126 | 1735 |
| 874812 | N/A | N/A | 37937 | 37956 | TGTTTAAGTAAAATGTTTTT | 119 | 1736 |
| 874836 | N/A | N/A | 40941 | 40960 | TGAGGTATCCAGAGTTACTA | 45 | 1737 |
| 874860 | N/A | N/A | 42836 | 42855 | AAATAATAATAATACAGAAG | 90 | 1738 |
| 874884 | N/A | N/A | 44389 | 44408 | CACGACTGGTCGATCCCTAG | 51 | 1739 |
| 874908 | N/A | N/A | 45927 | 45946 | TCATTAAAAAAACACATATA | 99 | 1740 |
| 874932 | N/A | N/A | 47502 | 47521 | CTAATAACTTACAACAACTG | 102 | 1741 |
| 874956 | N/A | N/A | 49373 | 49392 | CCCACCTCTTTTTGCATAAC | 85 | 1742 |
| 874980 | N/A | N/A | 52015 | 52034 | TATAGAAGAGGGCAATTTCT | 86 | 1743 |
| 875004 | N/A | N/A | 54998 | 55017 | GAAGGAAAAAAATAGAGGAG | 89 | 1744 |
| 875028 | N/A | N/A | 57198 | 57217 | AATAATAAAGACAGTATCAC | 86 | 1745 |
| 875052 | N/A | N/A | 59519 | 59538 | AATAATTCCATTCAAAGTAT | 81 | 1746 |
| 875076 | N/A | N/A | 61682 | 61701 | TAAAATGAAATTAATTCCAA | 117 | 1747 |
| 875100 | N/A | N/A | 63482 | 63501 | GATAAAGTGAGATAAAATAG | 103 | 1748 |
| 875124 | N/A | N/A | 66333 | 66352 | TAAATCCAGGAGTAAAAGAA | 81 | 1749 |
| 875148 | N/A | N/A | 69107 | 69126 | ACTGAGTTCTATAGGTGCTT | 31 | 1750 |
| 875172 | N/A | N/A | 71274 | 71293 | CAAAGTTCTAAGGAACAAAA | 113 | 1751 |
| 875196 | N/A | N/A | 72792 | 72811 | GCAAGATCTGGGTATCCATT | 40 | 1752 |
| 875220 | N/A | N/A | 74536 | 74555 | CTCTAGTTGGGAGTTAGACT | 109 | 1753 |
| 875244 | N/A | N/A | 76866 | 76885 | GGCTTAAAATGTCCTACTTC | 90 | 1754 |
| 875268 | N/A | N/A | 79384 | 79403 | ACATCCAGTAAAAAGTAAAT | 78 | 1755 |
| 875292 | N/A | N/A | 81142 | 81161 | ATGGGCATGGTAGCACGCGC | 80 | 1756 |
| 875316 | N/A | N/A | 82640 | 82659 | CAATTAGCTGCACAAACGGA | 104 | 1757 |
| 875340 | N/A | N/A | 84332 | 84351 | CAGTGAGCAAAGAAATTTCA | 118 | 1758 |
| 875364 | N/A | N/A | 85737 | 85756 | TAATTATCAGGCAGAGATAA | 79 | 1759 |
| 875388 | N/A | N/A | 88525 | 88544 | ACACTTTACTCACTGCGAAA | 41 | 1760 |
| 875412 | N/A | N/A | 90352 | 90371 | AACTGCCATTTTTCCAATTA | 49 | 1761 |
| 875436 | N/A | N/A | 92751 | 92770 | TGAGGAAAGGCTACCTTTGC | 87 | 1762 |
| 875460 | N/A | N/A | 95519 | 95538 | GAATTTGCCCCAAATAAGCC | 85 | 1763 |
| 875484 | N/A | N/A | 97532 | 97551 | GCTAACTGAAAAAGTACAGC | 89 | 1764 |
| 875508 | N/A | N/A | 99312 | 99331 | TTGTTCTAATGCTATATTGC | 36 | 1765 |
| 875532 | N/A | N/A | 101681 | 101700 | GCTGGTAACGATGTGGATAA | 52 | 1766 |
| 875556 | N/A | N/A | 105449 | 105468 | AGTTAAAATCATATCAACTA | 94 | 1767 |
| 875580 | N/A | N/A | 108631 | 108650 | AAAGTGGAAAAATTCAATTG | 117 | 1768 |
| 875604 | N/A | N/A | 111039 | 111058 | TTGAACAACTATCCACACAA | 119 | 1769 |
| 875628 | N/A | N/A | 113298 | 113317 | TAAGGGCAATGTATAAAGTA | 82 | 1770 |
| 875652 | N/A | N/A | 115440 | 115459 | GTTACAGTACCCTGTGAAGA | 75 | 1771 |
| 875676 | N/A | N/A | 118364 | 118383 | AAAATGAAAACTTTATGTCA | 87 | 1772 |
| 875700 | N/A | N/A | 120891 | 120910 | CCTGGACCACTACTCTCATC | 77 | 1773 |
| 875724 | N/A | N/A | 124961 | 124980 | AGCAGGCACAAAACTGATAC | 58 | 1774 |
| 875748 | N/A | N/A | 128029 | 128048 | ACACACCAAAAAAATTAAGG | 97 | 1775 |
| 875772 | N/A | N/A | 130077 | 130096 | AGAACTTGTTCATAAAATCC | 57 | 1776 |
| 875796 | N/A | N/A | 131945 | 131964 | CCCTCAGATCAAGTAGTGAA | 69 | 1777 |
| 875820 | N/A | N/A | 133661 | 133680 | GCAATGGAAATTTTAGCTTA | 39 | 1778 |
| 875844 | N/A | N/A | 136534 | 136553 | ATCTAGTAATGGATCCAAAA | 80 | 1779 |
| 875868 | N/A | N/A | 138482 | 138501 | AATCCTTAATATCCTCTAGA | 48 | 1780 |
| 875892 | N/A | N/A | 140856 | 140875 | TGAAATATTTTTACTATGCA | 57 | 1781 |
| 875916 | N/A | N/A | 142990 | 143009 | ATTCCAAAATAGTTCCCCAC | 79 | 1782 |
| 875940 | N/A | N/A | 145153 | 145172 | TAAAGTCAAAAAAGACTACT | 115 | 1783 |
| 875964 | N/A | N/A | 146768 | 146787 | CTCTTATGAAGCTGACTCCA | 82 | 1784 |
| 875988 | N/A | N/A | 148406 | 148425 | TACACTCAAAGCCAGTCCAT | 87 | 1785 |

TABLE 25
Percent control of human ATXN2 RNA with 5-10-5 MOE gapmers
with mixed internucleoside linkages

| | SEQ ID | SEQ ID | SEQ ID | SEQ ID | | | |
|---|---|---|---|---|---|---|---|
| | NO: 1 | NO: 1 | NO: 2 | NO: 2 | | | |
| Compound | Start | Stop | Start | Stop | | ATXN2 % | SEQ |
| Number | Site | Site | Site | Site | Sequence (5′ to 3′) | control | ID NO |
| 708199 | 1477 | 1496 | 81637 | 81656 | GCTAACTGGTTTGCCCTTGC | 27 | 32 |
| 874171 | 193 | 212 | 2183 | 2202 | GACTCGGTGGCCACCGCGGG | 80 | 1786 |
| 874195 | 402 | 421 | 2392 | 2411 | ACGCGCCGCCGCCGTTGCCG | 92 | 1787 |
| 874219 | 1083 | 1102 | 49257 | 49276 | CTGTACTTTTCTCATGTGCG | 44 | 1788 |
| 874240 | 1541 | 1560 | 81701 | 81720 | ACTCCTATCATCATTTTCCA | 85 | 1789 |
| 874264 | 1770 | 1789 | 83381 | 83400 | GGTCTGAACCAGAATTCGGG | 59 | 1790 |
| 874288 | 2664 | 2683 | 112973 | 112992 | TAGCACTTGGTTCAATTTTG | 26 | 1791 |
| 874312 | 2812 | 2831 | 113121 | 113140 | GGGCTGGAAGTCTGAACCCC | 120 | 1792 |
| 874334 | 3946 | 3965 | 147861 | 147880 | AGCATCATTGGCGCATGGGC | 24 | 1793 |
| 874358 | 4230 | 4249 | 148981 | 149000 | TTAGCATTCCTATTGGATGT | 70 | 1794 |
| 874382 | 4387 | 4406 | 149138 | 149157 | ACTTTCAAGGGTTATTAAAA | 54 | 1795 |
| 874405 | 4556 | 4575 | 149307 | 149326 | CTTGATTTATAAATAATAAT | 90 | 1796 |
| 874477 | N/A | N/A | 3621 | 3640 | CGGGCACTCCCCACCCCTTC | 71 | 1797 |
| 874501 | N/A | N/A | 4095 | 4114 | CGTTTCCTTCTCCCTTTGAA | 20 | 1798 |
| 874525 | N/A | N/A | 7401 | 7420 | TAGGCCCTTCTACAAGATAT | 79 | 1799 |
| 874549 | N/A | N/A | 9003 | 9022 | TGGTGGTGTGCGCATGTAGA | 47 | 1800 |
| 874573 | N/A | N/A | 12222 | 12241 | AATTCAAGGCCATCCTGGGC | 73 | 1801 |
| 874597 | N/A | N/A | 15438 | 15457 | TCTTCCAAACTTTTTTTTTT | 48 | 1802 |
| 874621 | N/A | N/A | 18178 | 18197 | GAAGAGTGAACCATGGCCAG | 69 | 1803 |
| 874645 | N/A | N/A | 20304 | 20323 | AGCAACCCGACCACAGCTGG | 86 | 1804 |
| 874669 | N/A | N/A | 23253 | 23272 | GCTGTATTTTTACTCACCTT | 18 | 1805 |
| 874693 | N/A | N/A | 27825 | 27844 | AATGTTCATCTTTTCACATC | 42 | 1806 |
| 874717 | N/A | N/A | 30442 | 30461 | TCATAATCTCAAATGCAAGC | 39 | 1807 |
| 874741 | N/A | N/A | 32163 | 32182 | CTGGGAGGCCAAGGTGAGTC | 71 | 1808 |
| 874765 | N/A | N/A | 33310 | 33329 | ATAATTATAGAGCTTCATGT | 42 | 1809 |
| 874789 | N/A | N/A | 36607 | 36626 | AACTGCTGGATAGCATTAAA | 73 | 1810 |
| 874813 | N/A | N/A | 37953 | 37972 | TAAAAGTCTAAAATTATGTT | 85 | 1811 |
| 874837 | N/A | N/A | 41033 | 41052 | GGGAAGAAGGATAGAACACT | 53 | 1812 |
| 874861 | N/A | N/A | 42880 | 42899 | GCATTGGTGACAGAGCAAAA | 81 | 1813 |
| 874885 | N/A | N/A | 44413 | 44432 | ATTCAGATCCAAAAAGTCTA | 107 | 1814 |
| 874909 | N/A | N/A | 45945 | 45964 | TGTACATTTTATACAGAGTC | 38 | 1815 |
| 874933 | N/A | N/A | 47521 | 47540 | GCAGTTTATCCCCAATAATC | 35 | 1816 |
| 874957 | N/A | N/A | 49426 | 49445 | ATCTTTGCTTGAATAAATCT | 66 | 1817 |
| 874981 | N/A | N/A | 52019 | 52038 | CTTTTATAGAAGAGGGCAAT | 76 | 1818 |
| 875005 | N/A | N/A | 55002 | 55021 | AAATGAAGGAAAAAAATAGA | 85 | 1819 |
| 875029 | N/A | N/A | 57201 | 57220 | ATAAATAATAAAGACAGTAT | 112 | 1820 |
| 875053 | N/A | N/A | 59564 | 59583 | TCTTTAGAGATTTATTTGAG | 67 | 1821 |
| 875077 | N/A | N/A | 61729 | 61748 | TCAAACCTATGGCAAAAGTG | 71 | 1822 |
| 875101 | N/A | N/A | 63615 | 63634 | TTATGGTGAGCTACGATGGC | 72 | 1823 |
| 875125 | N/A | N/A | 66398 | 66417 | GTGGGCTTGGTTTTGAAAAA | 67 | 1824 |
| 875149 | N/A | N/A | 69151 | 69170 | AATAATAATTTGAGATACCC | 77 | 1825 |
| 875173 | N/A | N/A | 71317 | 71336 | CTTTTAGAATCGAATACAAT | 83 | 1826 |
| 875197 | N/A | N/A | 72817 | 72836 | CATTGCATCATTAGCTAGAA | 67 | 1827 |
| 875221 | N/A | N/A | 74550 | 74569 | GCACAGGAAATTTTCTCTAG | 54 | 1828 |
| 875245 | N/A | N/A | 76887 | 76906 | CAACCTTTTCTTCAGACAAG | 120 | 1829 |
| 875269 | N/A | N/A | 79445 | 79464 | TTACTTAAGTAATGTATGCC | 105 | 1830 |
| 875293 | N/A | N/A | 81388 | 81407 | TTCTGTTACCTTTTCTCCAG | 60 | 1831 |
| 875317 | N/A | N/A | 82821 | 82840 | ACCTCAAACTGAACCGCCAG | 73 | 1832 |
| 875341 | N/A | N/A | 84407 | 84426 | GTATCATATATTTCTCAGCC | 23 | 1833 |
| 875365 | N/A | N/A | 85746 | 85765 | AAAGAAGCATAATTATCAGG | 65 | 1834 |
| 875389 | N/A | N/A | 88528 | 88547 | TTAACACTTTACTCACTGCG | 33 | 1835 |
| 875413 | N/A | N/A | 90523 | 90542 | GTTTGTATCCCATATGACTT | 42 | 1836 |
| 875437 | N/A | N/A | 92768 | 92787 | AAAGCTAAAACACAGGCTGA | 79 | 1837 |
| 875461 | N/A | N/A | 95659 | 95678 | TCAAGGAATATTAGTCAGTC | 70 | 1838 |
| 875485 | N/A | N/A | 97621 | 97640 | AAGACTTTTTATGTTGCTCC | 15 | 1839 |
| 875509 | N/A | N/A | 99383 | 99402 | TATTGCCATCTTACAAATAG | 100 | 1840 |
| 875533 | N/A | N/A | 102082 | 102101 | TGGTGGCAGGAGGCAGGAGA | 72 | 1841 |
| 875557 | N/A | N/A | 105635 | 105654 | ATGTGACGGCATGTGCCTGT | 141 | 1842 |
| 875581 | N/A | N/A | 108635 | 108654 | TCCCAAAGTGGAAAAATTCA | 83 | 1843 |
| 875605 | N/A | N/A | 111085 | 111104 | GCCAAACAGAACCTTCCAGT | 81 | 1844 |
| 875629 | N/A | N/A | 113410 | 113429 | CTTGTTTTTCTAGCCCTGGG | 82 | 1845 |
| 875653 | N/A | N/A | 115560 | 115579 | CAGCTATTTTTAAGAAACTG | 74 | 1846 |
| 875677 | N/A | N/A | 118824 | 118843 | TTCCAAGGCTAAAAAAAAAA | 116 | 1847 |
| 875701 | N/A | N/A | 120923 | 120942 | GGACAACGGATATCCACAAG | 86 | 1848 |
| 875725 | N/A | N/A | 125020 | 125039 | TTAAAATATAACTCACAACA | 87 | 1849 |
| 875749 | N/A | N/A | 128050 | 128069 | ATCATCAATGGCTGCTAAAA | 51 | 1850 |
| 875773 | N/A | N/A | 130117 | 130136 | GAATGACTGCTTACAACTAG | 50 | 1851 |
| 875797 | N/A | N/A | 131959 | 131978 | TGTAATGCCAGTGACCCTCA | 54 | 1852 |
| 875821 | N/A | N/A | 133854 | 133873 | TGAAAATCATCTGTACCTCA | 58 | 1853 |
| 875845 | N/A | N/A | 136627 | 136646 | GTACCAAAATAAAACTATTT | 81 | 1854 |
| 875869 | N/A | N/A | 138721 | 138740 | TTTCCTAGCACCAAATAAAT | 85 | 1855 |
| 875893 | N/A | N/A | 141020 | 141039 | TTTGAAATTTCACTTTTAAA | 86 | 1856 |
| 875917 | N/A | N/A | 143008 | 143027 | AGCCCATACACAGAAATGAT | 77 | 1857 |
| 875941 | N/A | N/A | 145161 | 145180 | ATACATACTAAAGTCAAAAA | 79 | 1858 |
| 875965 | N/A | N/A | 146830 | 146849 | TACATGTAAGTTCACATGCC | 129 | 1859 |
| 875989 | N/A | N/A | 148687 | 148706 | ATTCGCTTTTCCCCCTCCCA | 75 | 1860 |

TABLE 26
Percent control of human ATXN2 RNA with 5-10-5 MOE gapmers
with mixed internucleoside linkages

| | SEQ ID | SEQ ID | SEQ ID | SEQ ID | | | |
|---|---|---|---|---|---|---|---|
| | NO: 1 | NO: 1 | NO: 2 | NO: 2 | | | |
| Compound | Start | Stop | Start | Stop | | ATXN2 % | SEQ |
| Number | Site | Site | Site | Site | Sequence (5′ to 3′) | control | ID NO |
| 708152 | 1085 | 1104 | 49259 | 49278 | TTCTGTACTTTTCTCATGTG | 50 | 1861 |
| 708199 | 1477 | 1496 | 81637 | 81656 | GCTAACTGGTTTGCCCTTGC | 31 | 32 |
| 874172 | 198 | 217 | 2188 | 2207 | GGCGAGACTCGGTGGCCACC | 90 | 1862 |
| 874196 | 407 | 426 | 2397 | 2416 | CCGAAACGCGCCGCCGCCGT | 88 | 1863 |
| 874241 | 1553 | 1572 | 81713 | 81732 | TTTTTCTTCCTCACTCCTAT | 70 | 1864 |
| 874265 | 1800 | 1819 | N/A | N/A | GCCAGGGAACACCTCCATTA | 80 | 1865 |
| 874289 | 2665 | 2684 | 112974 | 112993 | TTAGCACTTGGTTCAATTTT | 55 | 1866 |
| 874313 | 2813 | 2832 | 113122 | 113141 | TGGGCTGGAAGTCTGAACCC | 88 | 1867 |
| 874335 | 3947 | 3966 | 147862 | 147881 | TAGCATCATTGGCGCATGGG | 29 | 1868 |
| 874359 | 4235 | 4254 | 148986 | 149005 | AACTGTTAGCATTCCTATTG | 32 | 1869 |
| 874383 | 4392 | 4411 | 149143 | 149162 | TCATGACTTTCAAGGGTTAT | 46 | 1870 |
| 874406 | 4561 | 4580 | 149312 | 149331 | TCAAACTTGATTTATAAATA | 94 | 1871 |
| 874478 | N/A | N/A | 3644 | 3663 | AAGGAGGAAGGCCGGGACGG | 90 | 1872 |
| 874502 | N/A | N/A | 4159 | 4178 | TGGTAAGCTCTGGCGGCACT | 50 | 1873 |
| 874526 | N/A | N/A | 7402 | 7421 | TTAGGCCCTTCTACAAGATA | 59 | 1874 |
| 874550 | N/A | N/A | 9185 | 9204 | AAAAACACAAGTACTTTCAT | 78 | 1875 |
| 874574 | N/A | N/A | 12346 | 12365 | AAGATCCTGCAACACACACA | 62 | 1876 |
| 874598 | N/A | N/A | 15441 | 15460 | CAGTCTTCCAAACTTTTTTT | 47 | 1877 |
| 874622 | N/A | N/A | 18202 | 18221 | CATAGAGCTTAAATTTTAGT | 57 | 1878 |
| 874646 | N/A | N/A | 20308 | 20327 | CCCCAGCAACCCGACCACAG | 94 | 1879 |
| 874670 | N/A | N/A | 23345 | 23364 | ACTGATAAATGACTCATCCC | 48 | 1880 |
| 874694 | N/A | N/A | 27838 | 27857 | ATTACCTAAATAAAATGTTC | 88 | 1881 |
| 874718 | N/A | N/A | 30485 | 30504 | TAATTGTAAAGTCCCTGCTC | 115 | 1882 |
| 874742 | N/A | N/A | 32207 | 32226 | AAAAAAGGCCAGTCGCAGTG | 73 | 1883 |
| 874766 | N/A | N/A | 33314 | 33333 | CAATATAATTATAGAGCTTC | 48 | 1884 |
| 874790 | N/A | N/A | 36647 | 36666 | GCATAAGACACCATGCCTAG | 89 | 1885 |
| 874814 | N/A | N/A | 38116 | 38135 | TCATGTCTCTCATATGTTTA | 67 | 1886 |
| 874838 | N/A | N/A | 41106 | 41125 | TAGAGTGATGGTAGGCATAC | 64 | 1887 |
| 874862 | N/A | N/A | 42969 | 42988 | CCCCGCTACTTGGTAGGGTG | 89 | 1888 |
| 874886 | N/A | N/A | 44472 | 44491 | TTTTAATAAAATAATCACAA | 90 | 1889 |
| 874910 | N/A | N/A | 46039 | 46058 | GCATGAGTCAATTAAACCTC | 39 | 1890 |
| 874934 | N/A | N/A | 47558 | 47577 | TTTTAACTTCATGGAATTAC | 72 | 1891 |
| 874958 | N/A | N/A | 49453 | 49472 | AAAAAAGTTTGTAAGATCAC | 87 | 1892 |
| 874982 | N/A | N/A | 52064 | 52083 | TGGTTTTCTCCATACTGATA | 43 | 1893 |
| 875006 | N/A | N/A | 55055 | 55074 | GTTGGAGTAAAGAGGAAAAC | 88 | 1894 |
| 875030 | N/A | N/A | 57279 | 57298 | GGCACTGAATTTCATTTATT | 43 | 1895 |
| 875054 | N/A | N/A | 59820 | 59839 | CGGCTGGAGTGCAATCTCAG | 82 | 1896 |
| 875078 | N/A | N/A | 61798 | 61817 | ACAGAATTTAGGAATTGAAA | 91 | 1897 |
| 875102 | N/A | N/A | 63893 | 63912 | AAAATGTAAATTGATTGTAG | 111 | 1898 |
| 875126 | N/A | N/A | 66456 | 66475 | AATAAAAACAAACCACAATG | 100 | 1899 |
| 875150 | N/A | N/A | 69170 | 69189 | CAAAAATATATATACATAAA | 103 | 1900 |
| 875174 | N/A | N/A | 71392 | 71411 | ATACAATTCCCAGCATTTCC | 78 | 1901 |
| 875198 | N/A | N/A | 72868 | 72887 | CATCAGGATGCTGAGAAAAT | 90 | 1902 |
| 875222 | N/A | N/A | 74610 | 74629 | AGTACTGACTTATGAAAGCA | 85 | 1903 |
| 875246 | N/A | N/A | 76925 | 76944 | CTTTAATTCCAATGTAACCT | 42 | 1904 |
| 875270 | N/A | N/A | 79474 | 79493 | AATCACACTTACTTATGGAG | 75 | 1905 |
| 875294 | N/A | N/A | 81536 | 81555 | TTTAAAGCCACAGTTTATGT | 49 | 1906 |
| 875318 | N/A | N/A | 82842 | 82861 | AATATCGGCAATGCTGATGA | 84 | 1907 |
| 875342 | N/A | N/A | 84409 | 84428 | AAGTATCATATATTTCTCAG | 50 | 1908 |
| 875366 | N/A | N/A | 85841 | 85860 | TTCAAGACTGGCTGAAGAAA | 86 | 1909 |
| 875390 | N/A | N/A | 88618 | 88637 | ACAAAACTTTATAGTTTTAC | 99 | 1910 |
| 875414 | N/A | N/A | 90912 | 90931 | GGAATTTGCTGGCAATCAAA | 31 | 1911 |
| 875438 | N/A | N/A | 92803 | 92822 | AATAAGTCAAGAATGAAGCT | 79 | 1912 |
| 875462 | N/A | N/A | 95679 | 95698 | AAAATGTGGTATTATCCACA | 119 | 1913 |
| 875486 | N/A | N/A | 97661 | 97680 | AGGCACCTAAAAGTAGTAAG | 45 | 1914 |
| 875510 | N/A | N/A | 99409 | 99428 | ACAGCCCTATTTGATGTAGA | 48 | 1915 |
| 875534 | N/A | N/A | 102327 | 102346 | AATATAAAAGGCACTCAAGC | 95 | 1916 |
| 875558 | N/A | N/A | 105640 | 105659 | GCCATATGTGACGGCATGTG | 92 | 1917 |
| 875582 | N/A | N/A | 108837 | 108856 | CCTCACCAAATGAACTAAAA | 105 | 1918 |
| 875606 | N/A | N/A | 111160 | 111179 | ATATTGGTCAGTTAGACATT | 85 | 1919 |
| 875630 | N/A | N/A | 113616 | 113635 | ACATTAACTAAAACACAGTT | 76 | 1920 |
| 875654 | N/A | N/A | 115601 | 115620 | AACTTAAAACTTTGTCAATT | 97 | 1921 |
| 875678 | N/A | N/A | 118878 | 118897 | CTCTATAATTTGATTACATT | 70 | 1922 |
| 875702 | N/A | N/A | 120942 | 120961 | TTTTCAACAAATGAGGTGGG | 87 | 1923 |
| 875726 | N/A | N/A | 125029 | 125048 | TGAAAGTTTTTAAAATATAA | 93 | 1924 |
| 875750 | N/A | N/A | 128051 | 128070 | TATCATCAATGGCTGCTAAA | 57 | 1925 |
| 875774 | N/A | N/A | 130162 | 130181 | TTTCTGGTGTGGCATTAACC | 68 | 1926 |
| 875798 | N/A | N/A | 132162 | 132181 | TGCTTATTATTCTCACATAT | 22 | 1927 |
| 875822 | N/A | N/A | 133992 | 134011 | GTTCATTCCAGATTTCACTG | 34 | 1928 |
| 875846 | N/A | N/A | 136702 | 136721 | AGTAAAAGGAATAAAATCAT | 98 | 1929 |
| 875870 | N/A | N/A | 138751 | 138770 | AGAGCATCTATTAAAGGATT | 76 | 1930 |
| 875894 | N/A | N/A | 141087 | 141106 | CGGAATCTCAGAGGTTTTTG | 52 | 1931 |
| 875918 | N/A | N/A | 143022 | 143041 | CCCTCAAGATAATAAGCCCA | 87 | 1932 |
| 875942 | N/A | N/A | 145277 | 145296 | GTACAGGAGAATGTACAGGG | 83 | 1933 |
| 875966 | N/A | N/A | 146947 | 146966 | AATGCCGTTTTTACTCTCAC | 18 | 1934 |
| 875990 | N/A | N/A | 148704 | 148723 | ACAAAACTCAAAATTGAATT | 103 | 1935 |

TABLE 27
Percent control of human ATXN2 RNA with 5-10-5 MOE gapmers
with mixed internucleoside linkages

| | SEQ ID | SEQ ID | SEQ ID | SEQ ID | | | |
|---|---|---|---|---|---|---|---|
| | NO: 1 | NO: 1 | NO: 2 | NO: 2 | | | |
| Compound | Start | Stop | Start | Stop | | ATXN2 % | SEQ |
| Number | Site | Site | Site | Site | Sequence (5′ to 3′) | control | ID NO |
| 708153 | 1087 | 1106 | 49261 | 49280 | GATTCTGTACTTTTCTCATG | 45 | 1936 |
| 708199 | 1477 | 1496 | 81637 | 81656 | GCTAACTGGTTTGCCCTTGC | 29 | 32 |
| 874173 | 203 | 222 | 2193 | 2212 | GAAGCGGCGAGACTCGGTGG | 96 | 1937 |
| 874197 | 412 | 431 | 2402 | 2421 | CCGGGCCGAAACGCGCCGCC | 109 | 1938 |
| 874242 | 1554 | 1573 | 81714 | 81733 | ATTTTTCTTCCTCACTCCTA | 64 | 1939 |
| 874266 | 2091 | 2110 | 88201 | 88220 | CAAATTCTAGGCCACTGGAT | 91 | 1940 |
| 874290 | 2666 | 2685 | 112975 | 112994 | CTTAGCACTTGGTTCAATTT | 45 | 1941 |
| 874314 | 2814 | 2833 | 113123 | 113142 | CTGGGCTGGAAGTCTGAACC | 92 | 1942 |
| 874336 | 3948 | 3967 | 147863 | 147882 | TTAGCATCATTGGCGCATGG | 52 | 1943 |
| 874360 | 4240 | 4259 | 148991 | 149010 | AAGTGAACTGTTAGCATTCC | 34 | 1944 |
| 874384 | 4397 | 4416 | 149148 | 149167 | TGTGTTCATGACTTTCAAGG | 18 | 1945 |
| 874407 | 4566 | 4585 | 149317 | 149336 | CCTCATCAAACTTGATTTAT | 52 | 1946 |
| 874479 | N/A | N/A | 3666 | 3685 | CGCCGGAGAGGTCTGGCGGG | 91 | 1947 |
| 874503 | N/A | N/A | 4530 | 4549 | AAGTAGTGTTTGGGATGCTT | 12 | 1948 |
| 874527 | N/A | N/A | 7453 | 7472 | AAACCCCATGTACATAGATG | 71 | 1949 |
| 874551 | N/A | N/A | 9771 | 9790 | TTCGAGATGAGCCTAACCAA | 78 | 1950 |
| 874575 | N/A | N/A | 12824 | 12843 | TACTTAAAATGCATAAAAAA | 86 | 1951 |
| 874599 | N/A | N/A | 15653 | 15672 | TAAGTGAACCACCTGCCTCA | 98 | 1952 |
| 874623 | N/A | N/A | 18210 | 18229 | CCTGCTTTCATAGAGCTTAA | 65 | 1953 |
| 874647 | N/A | N/A | 20402 | 20421 | ATTTCTTCACCCGTAAATAG | 60 | 1954 |
| 874671 | N/A | N/A | 23871 | 23890 | CATTGGTCAACAGTTCACAA | 42 | 1955 |
| 874695 | N/A | N/A | 27880 | 27899 | CTAATAGGCACACAATAAAT | 61 | 1956 |
| 874719 | N/A | N/A | 30635 | 30654 | TTATTACTTGCCAGGCATTG | 40 | 1957 |
| 874743 | N/A | N/A | 32289 | 32308 | TATGTTATTAAGTGTTTAAT | 89 | 1958 |
| 874767 | N/A | N/A | 33325 | 33344 | CTGTCACCATACAATATAAT | 67 | 1959 |
| 874791 | N/A | N/A | 36798 | 36817 | CTGCTAGACAAATTCTGTAA | 77 | 1960 |
| 874815 | N/A | N/A | 38215 | 38234 | TTATTAATTTCCTTATTTTG | 91 | 1961 |
| 874839 | N/A | N/A | 41127 | 41146 | ATGCCAAAATCACTGTGATT | 87 | 1962 |
| 874863 | N/A | N/A | 43158 | 43177 | GTCAAATTAATATAAAGAAA | 95 | 1963 |
| 874887 | N/A | N/A | 44512 | 44531 | TCTCATAAACATTAGTCATG | 43 | 1964 |
| 874911 | N/A | N/A | 46136 | 46155 | CAGCACTTCTCTCTCCTGTC | 39 | 1965 |
| 874935 | N/A | N/A | 47663 | 47682 | AATGAATTATATTAGACTGG | 51 | 1966 |
| 874959 | N/A | N/A | 49459 | 49478 | TCTTTAAAAAAAGTTTGTAA | 109 | 1967 |
| 874983 | N/A | N/A | 52103 | 52122 | AAAAAAAGAAGGAAACCATG | 98 | 1968 |
| 875007 | N/A | N/A | 55092 | 55111 | CAATGGAATAAGGAAACAGA | 102 | 1969 |
| 875031 | N/A | N/A | 57429 | 57448 | TTGTATTTCTCCGTACTGTC | 40 | 1970 |
| 875055 | N/A | N/A | 59830 | 59849 | TGGAGTCACCCGGCTGGAGT | 86 | 1971 |
| 875079 | N/A | N/A | 61810 | 61829 | AAGAATCAAAAAACAGAATT | 95 | 1972 |
| 875103 | N/A | N/A | 63905 | 63924 | TTCAGGGTGATGAAAATGTA | 82 | 1973 |
| 875127 | N/A | N/A | 66510 | 66529 | CATACAAACATAAATTAATT | 112 | 1974 |
| 875151 | N/A | N/A | 69174 | 69193 | ATCTCAAAAATATATATACA | 102 | 1975 |
| 875175 | N/A | N/A | 71435 | 71454 | TGCACTCATAAGTCTGGACG | 79 | 1976 |
| 875199 | N/A | N/A | 72897 | 72916 | TGGAGAGTTAGCACGAAATG | 106 | 1977 |
| 875223 | N/A | N/A | 74624 | 74643 | TAATGTTATTGAAGAGTACT | 107 | 1978 |
| 875247 | N/A | N/A | 76941 | 76960 | AGAAATTTATGTAATGCTTT | 80 | 1979 |
| 875271 | N/A | N/A | 79484 | 79503 | ATGGGCAGGAAATCACACTT | 79 | 1980 |
| 875295 | N/A | N/A | 81537 | 81556 | CTTTAAAGCCACAGTTTATG | 89 | 1981 |
| 875319 | N/A | N/A | 82852 | 82871 | TCATGGCTCCAATATCGGCA | 16 | 1982 |
| 875343 | N/A | N/A | 84424 | 84443 | GGGTTCCACACACTTAAGTA | 49 | 1983 |
| 875367 | N/A | N/A | 85857 | 85876 | GTAAAATGAACCTAAGTTCA | 77 | 1984 |
| 875391 | N/A | N/A | 88635 | 88654 | TATTAGAGAGGTACTTTACA | 84 | 1985 |
| 875415 | N/A | N/A | 90965 | 90984 | CCTCTCTAGCCCTTACCCTT | 84 | 1986 |
| 875439 | N/A | N/A | 92861 | 92880 | AGCTGAATAGATACATGTGC | 75 | 1987 |
| 875463 | N/A | N/A | 95779 | 95798 | ACGAGAAAAAAACTGCACAC | 95 | 1988 |
| 875487 | N/A | N/A | 97686 | 97705 | GGCTAAATAATACATTTGGT | 54 | 1989 |
| 875511 | N/A | N/A | 99731 | 99750 | GGTCTGACTCCGTTGCCCAG | 84 | 1990 |
| 875535 | N/A | N/A | 102493 | 102512 | ATACCCCAAAAGTACAGGCA | 97 | 1991 |
| 875559 | N/A | N/A | 105649 | 105668 | AAAATATCAGCCATATGTGA | 95 | 1992 |
| 875583 | N/A | N/A | 108869 | 108888 | CACAAGCATCAAGGCCATCT | 85 | 1993 |
| 875607 | N/A | N/A | 111262 | 111281 | TTAGGATGTGGAGGGACCGT | 85 | 1994 |
| 875631 | N/A | N/A | 113671 | 113690 | TCCATTTAATTAATATACTG | 79 | 1995 |
| 875655 | N/A | N/A | 115613 | 115632 | TGTTTCAGTAGGAACTTAAA | 84 | 1996 |
| 875679 | N/A | N/A | 118886 | 118905 | AGATTAAACTCTATAATTTG | 93 | 1997 |
| 875703 | N/A | N/A | 121448 | 121467 | ATTTGTCAAAACTCATTAAA | 73 | 1998 |
| 875727 | N/A | N/A | 125164 | 125183 | CAACATGGTGATTAGATCAT | 73 | 1999 |
| 875751 | N/A | N/A | 128148 | 128167 | AGAAATATTCCAGGCAATAA | 74 | 2000 |
| 875775 | N/A | N/A | 130284 | 130303 | GAATTCAGCTCAACTGTCAT | 91 | 2001 |
| 875799 | N/A | N/A | 132176 | 132195 | AAGATGGGTTTTTTTGCTTA | 21 | 2002 |
| 875823 | N/A | N/A | 134012 | 134031 | AGAACCGGCTCTAATGACTA | 72 | 2003 |
| 875847 | N/A | N/A | 136768 | 136787 | GGACTAAACCGGAAGACACT | 64 | 2004 |
| 875871 | N/A | N/A | 138796 | 138815 | GTTTCCCCTTTAATAGTATA | 48 | 2005 |
| 875895 | N/A | N/A | 141093 | 141112 | ACAGTACGGAATCTCAGAGG | 35 | 2006 |
| 875919 | N/A | N/A | 143144 | 143163 | GACAGCACACCGATGATAAA | 85 | 2007 |
| 875943 | N/A | N/A | 145320 | 145339 | CTAAGCTTTGCACACTTGGG | 80 | 2008 |
| 875967 | N/A | N/A | 146952 | 146971 | GATGAAATGCCGTTTTTACT | 39 | 2009 |
| 875991 | N/A | N/A | 148739 | 148758 | AGCACATGATTGTAAACTAT | 35 | 2010 |

TABLE 28
Percent control of human ATXN2 RNA with 5-10-5 MOE gapmers
with mixed internucleoside linkages

| | SEQ ID | SEQ ID | SEQ ID | SEQ ID | | | |
|---|---|---|---|---|---|---|---|
| | NO: 1 | NO: 1 | NO: 2 | NO: 2 | | | |
| Compound | Start | Stop | Start | Stop | | ATXN2 % | SEQ |
| Number | Site | Site | Site | Site | Sequence (5′ to 3′) | control | ID NO |
| 708199 | 1477 | 1496 | 81637 | 81656 | GCTAACTGGTTTGCCCTTGC | 29 | 32 |
| 874174 | 208 | 227 | 2198 | 2217 | GCGGCGAAGCGGCGAGACTC | 107 | 2011 |
| 874198 | 428 | 447 | 2418 | 2437 | AAGGAGCCGCCGGGAGCCGG | 87 | 2012 |
| 874220 | 1105 | 1124 | 49279 | 49298 | CGTTTCGGCCCCGAACTGGA | 51 | 2013 |
| 874243 | 1555 | 1574 | 81715 | 81734 | TATTTTTCTTCCTCACTCCT | 70 | 2014 |
| 874267 | 2093 | 2112 | 88203 | 88222 | TACAAATTCTAGGCCACTGG | 62 | 2015 |
| 874291 | 2668 | 2687 | 112977 | 112996 | TCCTTAGCACTTGGTTCAAT | 53 | 2016 |
| 874315 | 2816 | 2835 | 113125 | 113144 | TGCTGGGCTGGAAGTCTGAA | 88 | 2017 |
| 874337 | 3950 | 3969 | 147865 | 147884 | CATTAGCATCATTGGCGCAT | 81 | 2018 |
| 874361 | 4245 | 4264 | 148996 | 149015 | ACTGCAAGTGAACTGTTAGC | 87 | 2019 |
| 874385 | 4402 | 4421 | 149153 | 149172 | GCTGATGTGTTCATGACTTT | 35 | 2020 |
| 874408 | 4571 | 4590 | 149322 | 149341 | GATCACCTCATCAAACTTGA | 52 | 2021 |
| 874480 | N/A | N/A | 3671 | 3690 | CCGCGCGCCGGAGAGGTCTG | 90 | 2022 |
| 874504 | N/A | N/A | 4591 | 4610 | AAAGGGAAACTGAAGTTACC | 155 | 2023 |
| 874528 | N/A | N/A | 7600 | 7619 | CCTTTAATCTGCTTTCTTCT | 103 | 2024 |
| 874552 | N/A | N/A | 9851 | 9870 | GTAGGCTGCGCACGGTGGCT | 90 | 2025 |
| 874576 | N/A | N/A | 12944 | 12963 | AAACCAGGCCGGACGCGGTG | 146 | 2026 |
| 874600 | N/A | N/A | 15789 | 15808 | CTTGTGTCTGTTTTTTAGTA | 69 | 2027 |
| 874624 | N/A | N/A | 18211 | 18230 | TCCTGCTTTCATAGAGCTTA | 81 | 2028 |
| 874648 | N/A | N/A | 20415 | 20434 | CCTCTTGGTCTCAATTTCTT | 74 | 2029 |
| 874672 | N/A | N/A | 23931 | 23950 | GGTCAGAGGTTAAAAGTCTT | 79 | 2030 |
| 874696 | N/A | N/A | 27902 | 27921 | CTTGGCACAGCTCTCCTGAA | 126 | 2031 |
| 874720 | N/A | N/A | 30661 | 30680 | AAGAACAGCTAAAAGTTACT | 89 | 2032 |
| 874744 | N/A | N/A | 32321 | 32340 | ATACAGATCGCATAGCTTAA | 68 | 2033 |
| 874768 | N/A | N/A | 33334 | 33353 | CTATTGGTACTGTCACCATA | 82 | 2034 |
| 874792 | N/A | N/A | 36850 | 36869 | ATCAGTATTTACTACTTCTG | 34 | 2035 |
| 874816 | N/A | N/A | 38219 | 38238 | ACAATTATTAATTTCCTTAT | 114 | 2036 |
| 874840 | N/A | N/A | 41151 | 41170 | ACAGTCAGGAAAAGAGACAA | 96 | 2037 |
| 874864 | N/A | N/A | 43345 | 43364 | AAACCAAATATTTTACTATT | 89 | 2038 |
| 874888 | N/A | N/A | 44523 | 44542 | AATGTTATATTTCTCATAAA | 94 | 2039 |
| 874912 | N/A | N/A | 46218 | 46237 | GTTTCCCCTACGCTGCTCTC | 51 | 2040 |
| 874936 | N/A | N/A | 47696 | 47715 | CCCACAGATGCAGAGGACCA | 76 | 2041 |
| 874960 | N/A | N/A | 49471 | 49490 | AGCCCAGATATTTCTTTAAA | 99 | 2042 |
| 874984 | N/A | N/A | 52289 | 52308 | GTACTAAGAATACAAACAAA | 87 | 2043 |
| 875008 | N/A | N/A | 55163 | 55182 | TTTGCTGACCCCTATCATCT | 82 | 2044 |
| 875032 | N/A | N/A | 57470 | 57489 | ACAGTTTCACTAGGTTCTCA | 24 | 2045 |
| 875056 | N/A | N/A | 59886 | 59905 | TTTCTACAAAAACGGATATA | 92 | 2046 |
| 875080 | N/A | N/A | 61853 | 61872 | CTGTAGAAGAACTAAGACAA | 81 | 2047 |
| 875104 | N/A | N/A | 64010 | 64029 | TGTCCAGAATGGGCAAACCT | 81 | 2048 |
| 875128 | N/A | N/A | 66875 | 66894 | TGTTTTAACTAAGAGTCAGC | 75 | 2049 |
| 875152 | N/A | N/A | 69497 | 69516 | GGCCAGAGCGGATACCATAT | 88 | 2050 |
| 875176 | N/A | N/A | 71472 | 71491 | TATTTAGTCATTTTTAGCAC | 87 | 2051 |
| 875200 | N/A | N/A | 72951 | 72970 | AAAAGTAGCTCTTTCTAAAG | 87 | 2052 |
| 875224 | N/A | N/A | 74662 | 74681 | ATTAACACACTCTCACTTTG | 64 | 2053 |
| 875248 | N/A | N/A | 76949 | 76968 | TAAGACCAAGAAATTTATGT | 104 | 2054 |
| 875272 | N/A | N/A | 79499 | 79518 | CCTTTTGCCAAACACATGGG | 90 | 2055 |
| 875296 | N/A | N/A | 81540 | 81559 | GTCCTTTAAAGCCACAGTTT | 99 | 2056 |
| 875320 | N/A | N/A | 82893 | 82912 | TTCTCTGAGATCTCTTCTCT | 98 | 2057 |
| 875344 | N/A | N/A | 84594 | 84613 | ACAGTTAAACACTTATCTAA | 88 | 2058 |
| 875368 | N/A | N/A | 85860 | 85879 | GCTGTAAAATGAACCTAAGT | 61 | 2059 |
| 875392 | N/A | N/A | 88725 | 88744 | ATGTTTATAGAATGTACTGA | 60 | 2060 |
| 875416 | N/A | N/A | 91284 | 91303 | CAGAAGCCCTTTGTTACATA | 40 | 2061 |
| 875440 | N/A | N/A | 92863 | 92882 | AAAGCTGAATAGATACATGT | 95 | 2062 |
| 875464 | N/A | N/A | 96003 | 96022 | ACACTTCACACCCACAAGGA | 95 | 2063 |
| 875488 | N/A | N/A | 97870 | 97889 | TAGGGTTTCGCCATGTTATC | 43 | 2064 |
| 875512 | N/A | N/A | 99818 | 99837 | ACTTTTGGTGTTGCTTTTTC | 40 | 2065 |
| 875536 | N/A | N/A | 102497 | 102516 | AGTAATACCCCAAAAGTACA | 151 | 2066 |
| 875560 | N/A | N/A | 105876 | 105895 | CAGCTATAGAATACACATTC | 93 | 2067 |
| 875584 | N/A | N/A | 109381 | 109400 | GATACCTCTACAGAGTCACA | 81 | 2068 |
| 875608 | N/A | N/A | 111328 | 111347 | GGCAGATTTATAGTTCAGAA | 46 | 2069 |
| 875632 | N/A | N/A | 113780 | 113799 | CCCCAATTTATCAATAAGCT | 85 | 2070 |
| 875656 | N/A | N/A | 115778 | 115797 | AAAAACAACAATAAATTCAA | 98 | 2071 |
| 875680 | N/A | N/A | 119028 | 119047 | AAGTTCCCATTGCATTGTTT | 21 | 2072 |
| 875704 | N/A | N/A | 121520 | 121539 | GGACAGAGAAGAGGAACAGG | 83 | 2073 |
| 875728 | N/A | N/A | 125171 | 125190 | AAAACACCAACATGGTGATT | 95 | 2074 |
| 875752 | N/A | N/A | 128189 | 128208 | AGGGTAACCAAACAGCTGGA | 59 | 2075 |
| 875776 | N/A | N/A | 130418 | 130437 | AGTATAACACAGCACCATGT | 78 | 2076 |
| 875800 | N/A | N/A | 132257 | 132276 | ACAGTGAAAAATCTATTATT | 92 | 2077 |
| 875824 | N/A | N/A | 134106 | 134125 | AGCCTGCCTCCATACAGACA | 91 | 2078 |
| 875848 | N/A | N/A | 136819 | 136838 | TCATAAGAGATGACAAGCAC | 66 | 2079 |
| 875872 | N/A | N/A | 138832 | 138851 | ACCTACTATCTTTTACACAC | 84 | 2080 |
| 875896 | N/A | N/A | 141120 | 141139 | ATTCTGTTCATGGAGGTTCA | 41 | 2081 |
| 875920 | N/A | N/A | 143153 | 143172 | GTGACTATGGACAGCACACC | 77 | 2082 |
| 875944 | N/A | N/A | 145386 | 145405 | AAGCGACAGGAAAGAATTGA | 129 | 2083 |
| 875968 | N/A | N/A | 147009 | 147028 | GAGCCCTTGTTTCCTTTTTC | 109 | 2084 |
| 875992 | N/A | N/A | 148775 | 148794 | AACTGGCAACACCACACATC | 152 | 2085 |

TABLE 29
Percent control of human ATXN2 RNA with 5-10-5 MOE gapmers
with mixed internucleoside linkages

| | SEQ ID | SEQ ID | SEQ ID | SEQ ID | | | |
|---|---|---|---|---|---|---|---|
| | NO: 1 | NO: 1 | NO: 2 | NO: 2 | | | |
| Compound | Start | Stop | Start | Stop | | ATXN2 % | SEQ |
| Number | Site | Site | Site | Site | Sequence (5′ to 3′) | control | ID NO |
| 708199 | 1477 | 1496 | 81637 | 81656 | GCTAACTGGTTTGCCCTTGC | 30 | 32 |
| 874175 | 213 | 232 | 2203 | 2222 | TGGCTGCGGCGAAGCGGCGA | 94 | 2086 |
| 874199 | 433 | 452 | 2423 | 2442 | AGACCAAGGAGCCGCCGGGA | 64 | 2087 |
| 874221 | 1125 | 1144 | 49299 | 49318 | TACTCTCCATTATTTCTTCA | 46 | 2088 |
| 874244 | 1557 | 1576 | 81717 | 81736 | TGTATTTTTCTTCCTCACTC | 38 | 2089 |
| 874268 | 2095 | 2114 | 88205 | 88224 | GATACAAATTCTAGGCCACT | 51 | 2090 |
| 874292 | 2669 | 2688 | 112978 | 112997 | ATCCTTAGCACTTGGTTCAA | 87 | 2091 |
| 874316 | 3123 | 3142 | 116359 | 116378 | CTTGATTCACTGGCATGGGC | 52 | 2092 |
| 874338 | 4093 | 4112 | 148844 | 148863 | GGGCAGCCTTACAACTGCTG | 88 | 2093 |
| 874362 | 4257 | 4276 | 149008 | 149027 | CAAGTATCTTCCACTGCAAG | 70 | 2094 |
| 874386 | 4407 | 4426 | 149158 | 149177 | TGCTAGCTGATGTGTTCATG | 66 | 2095 |
| 874409 | 4576 | 4595 | 149327 | 149346 | ACAGTGATCACCTCATCAAA | 83 | 2096 |
| 874433 | N/A | N/A | 146548 | 146567 | GCCAGAGCCTCACTGGCGCA | 122 | 2097 |
| 874481 | N/A | N/A | 3676 | 3695 | ACCACCCGCGCGCCGGAGAG | 89 | 2098 |
| 874505 | N/A | N/A | 4702 | 4721 | GAATTATCTGCCAAATCTCT | 56 | 2099 |
| 874529 | N/A | N/A | 7648 | 7667 | CCAATCCATTTAAAATTGTA | 83 | 2100 |
| 874553 | N/A | N/A | 9909 | 9928 | TTTAAGATTTAGGATTTTTT | 81 | 2101 |
| 874577 | N/A | N/A | 13311 | 13330 | CACAAATAATTACCAGCAAA | 62 | 2102 |
| 874601 | N/A | N/A | 15978 | 15997 | GACCAATATCTGTACTCCCA | 41 | 2103 |
| 874625 | N/A | N/A | 18215 | 18234 | AAGTTCCTGCTTTCATAGAG | 49 | 2104 |
| 874649 | N/A | N/A | 20447 | 20466 | GCAGCCAATGATGAGATACT | 43 | 2105 |
| 874673 | N/A | N/A | 24094 | 24113 | CGGGCCCGGCCCGCATGTTT | 83 | 2106 |
| 874697 | N/A | N/A | 27956 | 27975 | ACCAGCCTGACAGGCTGGGC | 106 | 2107 |
| 874721 | N/A | N/A | 30733 | 30752 | CCAAGCCCATCAATACCACT | 80 | 2108 |
| 874745 | N/A | N/A | 32329 | 32348 | AATATTCCATACAGATCGCA | 30 | 2109 |
| 874769 | N/A | N/A | 33336 | 33355 | CTCTATTGGTACTGTCACCA | 42 | 2110 |
| 874793 | N/A | N/A | 36881 | 36900 | GAAAGATAAAGTTGTTTATT | 125 | 2111 |
| 874817 | N/A | N/A | 38303 | 38322 | TACTGGTTCTTGACCAGAAA | 91 | 2112 |
| 874841 | N/A | N/A | 41190 | 41209 | CAGCATCACCTAGTAATTAG | 47 | 2113 |
| 874865 | N/A | N/A | 43373 | 43392 | TTACTTTTAATCTTTTCATT | 79 | 2114 |
| 874889 | N/A | N/A | 44532 | 44551 | TTAAAGTGAAATGTTATATT | 99 | 2115 |
| 874913 | N/A | N/A | 46464 | 46483 | GCATAAAGAACTCTGCAGAC | 72 | 2116 |
| 874937 | N/A | N/A | 48095 | 48114 | AACCATGCCTCTTTTTTCTC | 30 | 2117 |
| 874961 | N/A | N/A | 49914 | 49933 | TACAAACTAATTTTTTAAGA | 117 | 2118 |
| 874985 | N/A | N/A | 52437 | 52456 | TTGATTAAACCATACCTTCC | 136 | 2119 |
| 875009 | N/A | N/A | 55244 | 55263 | AGCCATCAAAACAGCCATAG | 65 | 2120 |
| 875033 | N/A | N/A | 57471 | 57490 | CACAGTTTCACTAGGTTCTC | 51 | 2121 |
| 875057 | N/A | N/A | 59915 | 59934 | TCTAATAAGCTTTAGAATCA | 78 | 2122 |
| 875081 | N/A | N/A | 61874 | 61893 | AGAAAAAAGAAGAAAATGAT | 96 | 2123 |
| 875105 | N/A | N/A | 64054 | 64073 | AGAAAAAAAAAGGCTATATA | 119 | 2124 |
| 875129 | N/A | N/A | 66933 | 66952 | GGAAAGTGGAGTAAGTAGGG | 68 | 2125 |
| 875153 | N/A | N/A | 69604 | 69623 | GTGATGAACATACATAATAA | 59 | 2126 |
| 875177 | N/A | N/A | 71587 | 71606 | CCTGCGGCACTTTCAACAAC | 94 | 2127 |
| 875201 | N/A | N/A | 72955 | 72974 | CACCAAAAGTAGCTCTTTCT | 71 | 2128 |
| 875225 | N/A | N/A | 74767 | 74786 | TCCCAGAACCCACTTCTTCA | 132 | 2129 |
| 875249 | N/A | N/A | 77066 | 77085 | CAGCATACCCAGCTAAGCAC | 124 | 2130 |
| 875273 | N/A | N/A | 79530 | 79549 | ACTATAATGTAAGTCTACCA | 136 | 2131 |
| 875297 | N/A | N/A | 81557 | 81576 | AAAGAAAAGCAAAATGAGTC | 77 | 2132 |
| 875321 | N/A | N/A | 82937 | 82956 | CTATCTTCACAACATTTTTT | 93 | 2133 |
| 875345 | N/A | N/A | 84688 | 84707 | CTGTGAGTATCAAATGATAA | 56 | 2134 |
| 875369 | N/A | N/A | 85954 | 85973 | TCAGCTACATGGGCTGTCGC | 121 | 2135 |
| 875393 | N/A | N/A | 88766 | 88785 | CAGATGCTATAGAAACACAC | 40 | 2136 |
| 875417 | N/A | N/A | 91311 | 91330 | TCAATTTCACAGCTGAGATT | 72 | 2137 |
| 875441 | N/A | N/A | 92866 | 92885 | ATTAAAGCTGAATAGATACA | 120 | 2138 |
| 875465 | N/A | N/A | 96065 | 96084 | ACAAAAGATGTTCAACATCA | 125 | 2139 |
| 875489 | N/A | N/A | 98062 | 98081 | ATATTTTTTTTTTCCACTCT | 32 | 2140 |
| 875513 | N/A | N/A | 99836 | 99855 | AGTGAAGGCAAAAATCAGAC | 83 | 2141 |
| 875537 | N/A | N/A | 102822 | 102841 | TGGCATGGTACTGGCATAAA | 55 | 2142 |
| 875561 | N/A | N/A | 106019 | 106038 | CTCAGTAACAGTCGGAAACT | 103 | 2143 |
| 875585 | N/A | N/A | 109417 | 109436 | GGAATTCTCCCAGATCTTCC | 83 | 2144 |
| 875609 | N/A | N/A | 111754 | 111773 | ATAAAGGAACTTAAAAGCTA | 90 | 2145 |
| 875633 | N/A | N/A | 113815 | 113834 | TAAAAAAAAATTGCCTCAAA | 109 | 2146 |
| 875657 | N/A | N/A | 115792 | 115811 | AAGGCTTTGGCTACAAAAAC | 94 | 2147 |
| 875681 | N/A | N/A | 119037 | 119056 | GACAACAAAAAGTTCCCATT | 38 | 2148 |
| 875705 | N/A | N/A | 121526 | 121545 | ACAGTTGGACAGAGAAGAGG | 76 | 2149 |
| 875729 | N/A | N/A | 125288 | 125307 | CTAACTGTATGCTTAATAGT | 133 | 2150 |
| 875753 | N/A | N/A | 128252 | 128271 | GACTGCCTTAAAAAGGGAAA | 151 | 2151 |
| 875777 | N/A | N/A | 130493 | 130512 | CCAACACTAACTTTCTATCT | 144 | 2152 |
| 875801 | N/A | N/A | 132282 | 132301 | ATGGACATTTTATTTTAAAT | 83 | 2153 |
| 875825 | N/A | N/A | 134120 | 134139 | ACAGCCTTGCTCCTAGCCTG | 75 | 2154 |
| 875849 | N/A | N/A | 136822 | 136841 | TTTTCATAAGAGATGACAAG | 84 | 2155 |
| 875873 | N/A | N/A | 138868 | 138887 | ACATTTGAGACCTCAAATTG | 101 | 2156 |
| 875897 | N/A | N/A | 141190 | 141209 | CCCAGCCTCTTAAAAATGTC | 86 | 2157 |
| 875921 | N/A | N/A | 143195 | 143214 | GTTGAGAATCAGAAGCAGAG | 58 | 2158 |
| 875945 | N/A | N/A | 145674 | 145693 | ATAACCTTCACATTCTACTT | 85 | 2159 |
| 875969 | N/A | N/A | 147105 | 147124 | TCAACCTGGTCTCACTCACT | 69 | 2160 |
| 875993 | N/A | N/A | 148785 | 148804 | TGAAACAGAAAACTGGCAAC | 87 | 2161 |

TABLE 30
Percent control of human ATXN2 RNA with 5-10-5 MOE gapmers
with mixed internucleoside linkages

| | SEQ ID | SEQ ID | SEQ ID | SEQ ID | | | |
|---|---|---|---|---|---|---|---|
| | NO: 1 | NO: 1 | NO: 2 | NO: 2 | | | |
| Compound | Start | Stop | Start | Stop | | ATXN2 % | SEQ |
| Number | Site | Site | Site | Site | Sequence (5′ to 3′) | control | ID NO |
| 708199 | 1477 | 1496 | 81637 | 81656 | GCTAACTGGTTTGCCCTTGC | 27 | 32 |
| 874176 | 223 | 242 | 2213 | 2232 | CCGGGCCACCTGGCTGCGGC | 76 | 2162 |
| 874200 | 438 | 457 | 2428 | 2447 | CGCCGAGACCAAGGAGCCGC | 100 | 2163 |
| 874222 | 1127 | 1146 | 49301 | 49320 | AATACTCTCCATTATTTCTT | 42 | 2164 |
| 874245 | 1558 | 1577 | 81718 | 81737 | GTGTATTTTTCTTCCTCACT | 41 | 2165 |
| 874269 | 2097 | 2116 | 88207 | 88226 | GGGATACAAATTCTAGGCCA | 59 | 2166 |
| 874293 | 2670 | 2689 | 112979 | 112998 | AATCCTTAGCACTTGGTTCA | 53 | 2167 |
| 874317 | 3125 | 3144 | 116361 | 116380 | GGCTTGATTCACTGGCATGG | 74 | 2168 |
| 874339 | 4098 | 4117 | 148849 | 148868 | CTCCAGGGCAGCCTTACAAC | 166 | 2169 |
| 874363 | 4262 | 4281 | 149013 | 149032 | CGGTCCAAGTATCTTCCACT | 39 | 2170 |
| 874387 | 4412 | 4431 | 149163 | 149182 | TCTTTTGCTAGCTGATGTGT | 61 | 2171 |
| 874410 | 4586 | 4605 | 149337 | 149356 | ACCACTGTAGACAGTGATCA | 85 | 2172 |
| 874434 | N/A | N/A | 146553 | 146572 | ACCTTGCCAGAGCCTCACTG | 73 | 2173 |
| 874482 | N/A | N/A | 3688 | 3707 | TGCGGATCGGCCACCACCCG | 88 | 2174 |
| 874506 | N/A | N/A | 4749 | 4768 | TGCAACTTAATAACCTTAGT | 15 | 2175 |
| 874530 | N/A | N/A | 7734 | 7753 | GACTAATTAACCTAGATAAA | 94 | 2176 |
| 874554 | N/A | N/A | 9932 | 9951 | GCTTAGAGTTTTTGCCTTCC | 10 | 2177 |
| 874578 | N/A | N/A | 13355 | 13374 | CTTTAAATGTTAATGAGAAT | 92 | 2178 |
| 874602 | N/A | N/A | 16423 | 16442 | CTCCCAGGCCGGGAGTGGTG | 77 | 2179 |
| 874626 | N/A | N/A | 18328 | 18347 | TAAATAAACTAAGCCTGAGA | 85 | 2180 |
| 874650 | N/A | N/A | 20475 | 20494 | AAGTACATCAGATTCTAATG | 49 | 2181 |
| 874674 | N/A | N/A | 24497 | 24516 | AAACACTTGTTCCTACTGTC | 36 | 2182 |
| 874698 | N/A | N/A | 27969 | 27988 | CAGATATGGCACTACCAGCC | 81 | 2183 |
| 874722 | N/A | N/A | 30818 | 30837 | GTCTGACAGCATCAAATGTG | 79 | 2184 |
| 874746 | N/A | N/A | 32340 | 32359 | GGAAATTAAGTAATATTCCA | 92 | 2185 |
| 874770 | N/A | N/A | 33607 | 33626 | ATCTGAGGTCAGGAACTCAA | 76 | 2186 |
| 874794 | N/A | N/A | 36935 | 36954 | CAGGAATTAAAGGCCAGTCT | 64 | 2187 |
| 874818 | N/A | N/A | 38320 | 38339 | TGTAGAATATACATATTTAC | 100 | 2188 |
| 874842 | N/A | N/A | 41277 | 41296 | TATGAGGGACTAGAGCATCC | 37 | 2189 |
| 874866 | N/A | N/A | 43499 | 43518 | CTAATTTCCACTGATCTATG | 60 | 2190 |
| 874890 | N/A | N/A | 44538 | 44557 | ACATCATTAAAGTGAAATGT | 75 | 2191 |
| 874914 | N/A | N/A | 46468 | 46487 | AAAAGCATAAAGAACTCTGC | 62 | 2192 |
| 874938 | N/A | N/A | 48098 | 48117 | CGCAACCATGCCTCTTTTTT | 90 | 2193 |
| 874962 | N/A | N/A | 50020 | 50039 | CACATGCCCACTTATAAACT | 105 | 2194 |
| 874986 | N/A | N/A | 52556 | 52575 | ACACCCTGACTGTCCAGAGC | 96 | 2195 |
| 875010 | N/A | N/A | 55256 | 55275 | CTCTATGGCTACAGCCATCA | 149 | 2196 |
| 875034 | N/A | N/A | 57481 | 57500 | TCACTAGGTACACAGTTTCA | 64 | 2197 |
| 875058 | N/A | N/A | 59957 | 59976 | TGTGGAAAAAAATTTCCAAA | 90 | 2198 |
| 875082 | N/A | N/A | 62377 | 62396 | GCTCAGGAGTTCAAGACAGC | 99 | 2199 |
| 875106 | N/A | N/A | 64118 | 64137 | CTGCAATCATGCCACTGCGC | 84 | 2200 |
| 875130 | N/A | N/A | 66996 | 67015 | ACTGGTTCTCCAACTGTACT | 101 | 2201 |
| 875154 | N/A | N/A | 69659 | 69678 | GCATTAAATATTAAGATCCA | 92 | 2202 |
| 875178 | N/A | N/A | 71639 | 71658 | TCAAAGTTCCATATAAACCT | 69 | 2203 |
| 875202 | N/A | N/A | 72957 | 72976 | TTCACCAAAAGTAGCTCTTT | 68 | 2204 |
| 875226 | N/A | N/A | 74790 | 74809 | GCCATTCTAAGTGGTTTAAC | 76 | 2205 |
| 875250 | N/A | N/A | 77268 | 77287 | TAACACTCATTTTTGGCAAG | 58 | 2206 |
| 875274 | N/A | N/A | 79564 | 79583 | TAACCTTGGGTCCTCCTGTG | 103 | 2207 |
| 875298 | N/A | N/A | 81589 | 81608 | TCTCTTTCTAAGGGCACTCT | 80 | 2208 |
| 875322 | N/A | N/A | 82976 | 82995 | CCACTTGACCTCTCTATGGC | 132 | 2209 |
| 875346 | N/A | N/A | 84758 | 84777 | GTTTGGAATCTTATTAAGCA | 19 | 2210 |
| 875370 | N/A | N/A | 86008 | 86027 | TTCTTCTGGCATTCTAAAAA | 74 | 2211 |
| 875394 | N/A | N/A | 88861 | 88880 | ATATTCCTTATGCTAATCAC | 47 | 2212 |
| 875418 | N/A | N/A | 91332 | 91351 | TATAATATCACCCTCTAACA | 95 | 2213 |
| 875442 | N/A | N/A | 92879 | 92898 | AACTGTTAATAGCATTAAAG | 93 | 2214 |
| 875466 | N/A | N/A | 96102 | 96121 | CATCAATCCAAAGAAGATAT | 90 | 2215 |
| 875490 | N/A | N/A | 98063 | 98082 | CATATTTTTTTTTTCCACTC | 31 | 2216 |
| 875514 | N/A | N/A | 99918 | 99937 | CTTTAGTAGAGGCGATCCAC | 67 | 2217 |
| 875538 | N/A | N/A | 102856 | 102875 | ATCATTATCTGACTTCAAAT | 82 | 2218 |
| 875562 | N/A | N/A | 106022 | 106041 | GACCTCAGTAACAGTCGGAA | 93 | 2219 |
| 875586 | N/A | N/A | 109466 | 109485 | CATTTGTTTGGAGAAATGTA | 116 | 2220 |
| 875610 | N/A | N/A | 111768 | 111787 | AAAGGAATATGACAATAAAG | 94 | 2221 |
| 875634 | N/A | N/A | 113841 | 113860 | GACATACCTGGAAAAAGTCA | 94 | 2222 |
| 875658 | N/A | N/A | 115994 | 116013 | CTTGGTGTCAGATACAAACA | 62 | 2223 |
| 875682 | N/A | N/A | 119087 | 119106 | AGCCAAACTGTCATGCTTGC | 57 | 2224 |
| 875706 | N/A | N/A | 121576 | 121595 | TAGTAAAAGAAGGCAGATTA | 89 | 2225 |
| 875730 | N/A | N/A | 125327 | 125346 | AACAAACCCACCTCTGCAAA | 66 | 2226 |
| 875754 | N/A | N/A | 128289 | 128308 | TTTGGAGGATAACAGAAAAC | 84 | 2227 |
| 875778 | N/A | N/A | 130500 | 130519 | AACAGATCCAACACTAACTT | 80 | 2228 |
| 875802 | N/A | N/A | 132362 | 132381 | AATGAAATCAGTACTATTTA | 85 | 2229 |
| 875826 | N/A | N/A | 134239 | 134258 | CCTCCCCAAGTTCTTGGATT | 97 | 2230 |
| 875850 | N/A | N/A | 136826 | 136845 | TTCATTTTCATAAGAGATGA | 89 | 2231 |
| 875874 | N/A | N/A | 138983 | 139002 | GGGAAGTTGTGCTAAGGCAA | 45 | 2232 |
| 875898 | N/A | N/A | 141431 | 141450 | GACTACAGGCGCGCCTGGCT | 86 | 2233 |
| 875922 | N/A | N/A | 143582 | 143601 | GAACTGAAAGCCAGTTCTTT | 83 | 2234 |
| 875946 | N/A | N/A | 145831 | 145850 | AAAGGACTGACCAATCAGCA | 51 | 2235 |
| 875970 | N/A | N/A | 147296 | 147315 | TTGCCTCTCTCCCTCTGCTT | 77 | 2236 |
| 875994 | N/A | N/A | 148798 | 148817 | GAAAAGCGAACATTGAAACA | 119 | 2237 |

TABLE 31
Percent control of human ATXN2 RNA with 5-10-5 MOE gapmers
with mixed internucleoside linkages

| | SEQ ID | SEQ ID | SEQ ID | SEQ ID | | | |
|---|---|---|---|---|---|---|---|
| | NO: 1 | NO: 1 | NO: 2 | NO: 2 | | | |
| Compound | Start | Stop | Start | Stop | | ATXN2 % | SEQ |
| Number | Site | Site | Site | Site | Sequence (5′ to 3′) | control | ID NO |
| 708199 | 1477 | 1496 | 81637 | 81656 | GCTAACTGGTTTGCCCTTGC | 25 | 32 |
| 874177 | 228 | 247 | 2218 | 2237 | GCCACCCGGGCCACCTGGCT | 104 | 2238 |
| 874201 | 443 | 462 | 2433 | 2452 | AGGCCCGCCGAGACCAAGGA | 111 | 2239 |
| 874223 | 1131 | 1150 | 49305 | 49324 | ACAAAATACTCTCCATTATT | 69 | 2240 |
| 874246 | 1559 | 1578 | 81719 | 81738 | TGTGTATTTTTCTTCCTCAC | 29 | 2241 |
| 874270 | 2103 | 2122 | 88213 | 88232 | GGTTGTGGGATACAAATTCT | 53 | 2242 |
| 874294 | 2671 | 2690 | 112980 | 112999 | GAATCCTTAGCACTTGGTTC | 59 | 2243 |
| 874318 | 3126 | 3145 | 116362 | 116381 | TGGCTTGATTCACTGGCATG | 82 | 2244 |
| 874340 | 4111 | 4130 | 148862 | 148881 | GGCCTTTCGGTTCCTCCAGG | 68 | 2245 |
| 874364 | 4267 | 4286 | 149018 | 149037 | CTACTCGGTCCAAGTATCTT | 44 | 2246 |
| 874388 | 4417 | 4436 | 149168 | 149187 | TTACTTCTTTTGCTAGCTGA | 31 | 2247 |
| 874411 | 4598 | 4617 | 149349 | 149368 | CTTAAAAGTTGAACCACTGT | 96 | 2248 |
| 874435 | N/A | N/A | 146558 | 146577 | CCCACACCTTGCCAGAGCCT | 74 | 2249 |
| 874483 | N/A | N/A | 3693 | 3712 | AGCAATGCGGATCGGCCACC | 83 | 2250 |
| 874507 | N/A | N/A | 4848 | 4867 | AAAGACCTTGTGGTACTAAA | 53 | 2251 |
| 874531 | N/A | N/A | 7757 | 7776 | ATAAATTACTAATGAAGCCA | 43 | 2252 |
| 874555 | N/A | N/A | 9936 | 9955 | CAAAGCTTAGAGTTTTTGCC | 63 | 2253 |
| 874579 | N/A | N/A | 13511 | 13530 | TATTTGCAACACTGCACTCC | 117 | 2254 |
| 874603 | N/A | N/A | 16532 | 16551 | ACCTGGTGTTATGAGTCACC | 74 | 2255 |
| 874627 | N/A | N/A | 18680 | 18699 | AGTATCTCAGTTTTTTTTTT | 17 | 2256 |
| 874651 | N/A | N/A | 20482 | 20501 | GAAATAAAAGTACATCAGAT | 63 | 2257 |
| 874675 | N/A | N/A | 24888 | 24907 | CCATCCCAGATAACACGGCG | 133 | 2258 |
| 874699 | N/A | N/A | 28082 | 28101 | AAAGACTTTGAAATCTCACA | 21 | 2259 |
| 874723 | N/A | N/A | 30895 | 30914 | TGCATGCCTGCCTTCTCTAC | 74 | 2260 |
| 874747 | N/A | N/A | 32353 | 32372 | TTCATAAGGTTGTGGAAATT | 93 | 2261 |
| 874771 | N/A | N/A | 33816 | 33835 | CGTATGTTTGTCTGTCTTAT | 8 | 2262 |
| 874795 | N/A | N/A | 36992 | 37011 | GGTGCAGCCTGTAGTCTCAG | 69 | 2263 |
| 874819 | N/A | N/A | 38371 | 38390 | TCCACATATATATGTAGAAT | 85 | 2264 |
| 874843 | N/A | N/A | 41450 | 41469 | AATCACTCGAGATTAAAAAC | 67 | 2265 |
| 874867 | N/A | N/A | 43533 | 43552 | TATAAAAAAACAGTACAGTA | 70 | 2266 |
| 874891 | N/A | N/A | 44605 | 44624 | ATAGAATATAATACAACCTA | 70 | 2267 |
| 874915 | N/A | N/A | 46475 | 46494 | CAAAATAAAAAGCATAAAGA | 124 | 2268 |
| 874939 | N/A | N/A | 48160 | 48179 | TGTCATACTGTATTGTTTTA | 16 | 2269 |
| 874963 | N/A | N/A | 50170 | 50189 | CTCAAAACCTTGTCTCATAC | 54 | 2270 |
| 874987 | N/A | N/A | 52570 | 52589 | GAAACCCATAGCTCACACCC | 120 | 2271 |
| 875011 | N/A | N/A | 55273 | 55292 | CAGCTACAACTACTCAACTC | 78 | 2272 |
| 875035 | N/A | N/A | 57555 | 57574 | AAAATTAATTTTTAAAAGAA | 95 | 2273 |
| 875059 | N/A | N/A | 60014 | 60033 | ACAAGTTATGTTTTAATTCT | 99 | 2274 |
| 875083 | N/A | N/A | 62546 | 62565 | ATTAGGCTTCTGGATCAGGA | 30 | 2275 |
| 875107 | N/A | N/A | 64341 | 64360 | AGATGCGGTGGCTCATGGCT | 71 | 2276 |
| 875131 | N/A | N/A | 67056 | 67075 | GGTAAAAAAGACACTACATA | 79 | 2277 |
| 875155 | N/A | N/A | 69693 | 69712 | TGTTGGCATAGTAACATACA | 55 | 2278 |
| 875179 | N/A | N/A | 71660 | 71679 | AAATCAGCCTTTTCTCAAAC | 78 | 2279 |
| 875203 | N/A | N/A | 72969 | 72988 | TGGTTTTAAAATTTCACCAA | 115 | 2280 |
| 875227 | N/A | N/A | 74793 | 74812 | GAAGCCATTCTAAGTGGTTT | 84 | 2281 |
| 875251 | N/A | N/A | 77332 | 77351 | ATATGTTACAAATTCTCTTT | 73 | 2282 |
| 875275 | N/A | N/A | 79658 | 79677 | TAAAGGTTGTAATCCATCCC | 46 | 2283 |
| 875299 | N/A | N/A | 81847 | 81866 | ATATAATAACAATACACCGT | 66 | 2284 |
| 875323 | N/A | N/A | 83010 | 83029 | CACAAAGTTTAACAGATGCG | 47 | 2285 |
| 875347 | N/A | N/A | 84815 | 84834 | TGGTTCCTTACAATTATCTA | 26 | 2286 |
| 875371 | N/A | N/A | 86056 | 86075 | TAAGATTGCAAAGCTAACTT | 65 | 2287 |
| 875395 | N/A | N/A | 88869 | 88888 | CTGTCAGCATATTCCTTATG | 62 | 2288 |
| 875419 | N/A | N/A | 91453 | 91472 | CCTTTGTAACACAGACACTA | 43 | 2289 |
| 875443 | N/A | N/A | 93030 | 93049 | TCTATTTTTGGTCAAGACAG | 74 | 2290 |
| 875467 | N/A | N/A | 96143 | 96162 | AAGACAACTCAATTTTTAAA | 167 | 2291 |
| 875491 | N/A | N/A | 98116 | 98135 | TTAGAAAGTTCACTCTTTTA | 87 | 2292 |
| 875515 | N/A | N/A | 99926 | 99945 | ACAAAAATCTTTAGTAGAGG | 88 | 2293 |
| 875539 | N/A | N/A | 102868 | 102887 | AAAACGGGAGGAATCATTAT | 113 | 2294 |
| 875563 | N/A | N/A | 106187 | 106206 | ATAGATTTTGAGACAAAGTC | 103 | 2295 |
| 875587 | N/A | N/A | 109530 | 109549 | GGCCATGGCAGTGCTTGTGT | 103 | 2296 |
| 875611 | N/A | N/A | 111837 | 111856 | AAGCACCAATGGCTGGACCA | 89 | 2297 |
| 875635 | N/A | N/A | 113885 | 113904 | TATTCTAGCATGCAGTAATT | 62 | 2298 |
| 875659 | N/A | N/A | 116005 | 116024 | CCTAAAGAGTGCTTGGTGTC | 68 | 2299 |
| 875683 | N/A | N/A | 119112 | 119131 | TTAGAATGTGACTCTCCCAT | 55 | 2300 |
| 875707 | N/A | N/A | 121601 | 121620 | ATCTAAAGAGGATAAATCTA | 114 | 2301 |
| 875731 | N/A | N/A | 125371 | 125390 | AAGTATTTGAACATAATCCA | 51 | 2302 |
| 875755 | N/A | N/A | 128357 | 128376 | AAAAAAAATTCCAGAAGTTT | 81 | 2303 |
| 875779 | N/A | N/A | 130588 | 130607 | GCATTATGAAATCGCTTCTC | 45 | 2304 |
| 875803 | N/A | N/A | 132506 | 132525 | CCATAATCTCATTCTCATAG | 31 | 2305 |
| 875827 | N/A | N/A | 134571 | 134590 | AGAACATGCTTAAGCAGATT | 59 | 2306 |
| 875851 | N/A | N/A | 137089 | 137108 | GGCACAAGGAAAATATTGTT | 53 | 2307 |
| 875875 | N/A | N/A | 139090 | 139109 | GACCAAACCATCATAAAATG | 64 | 2308 |
| 875899 | N/A | N/A | 141630 | 141649 | AAAAATTTATTTTTGAATAA | 98 | 2309 |
| 875923 | N/A | N/A | 143668 | 143687 | GAGTGCCCCAGCCCTTTGGA | 106 | 2310 |
| 875947 | N/A | N/A | 145860 | 145879 | GATATTTTTAAGGTCTCAGT | 37 | 2311 |
| 875971 | N/A | N/A | 147316 | 147335 | TTACTTGGACCTCTGTTCAT | 84 | 2312 |
| 875995 | N/A | N/A | 148812 | 148831 | TTGTACTGTAAAAAGAAAAG | 104 | 2313 |

TABLE 32
Percent control of human ATXN2 RNA with 5-10-5 MOE gapmers
with mixed internucleoside linkages

| | SEQ ID | SEQ ID | SEQ ID | SEQ ID | | | |
|---|---|---|---|---|---|---|---|
| | NO: 1 | NO: 1 | NO: 2 | NO: 2 | | | |
| Compound | Start | Stop | Start | Stop | | ATXN2 % | SEQ |
| Number | Site | Site | Site | Site | Sequence (5′ to 3′) | control | ID NO |
| 708199 | 1477 | 1496 | 81637 | 81656 | GCTAACTGGTTTGCCCTTGC | 15 | 32 |
| 937361 | 893 | 912 | 45747 | 45766 | TTTGTTACTGTTTCGACCTC | 56 | 2314 |
| 937371 | 2359 | 2378 | 91243 | 91262 | GCTCTGTTCGATGCAGGACT | 43 | 2315 |
| 937383 | 4394 | 4413 | 149145 | 149164 | GTTCATGACTTTCAAGGGTT | 10 | 2316 |
| 937394 | 4414 | 4433 | 149165 | 149184 | CTTCTTTTGCTAGCTGATGT | 32 | 2317 |
| 937418 | N/A | N/A | 4092 | 4111 | TTCCTTCTCCCTTTGAACAC | 59 | 2318 |
| 937430 | N/A | N/A | 4535 | 4554 | TGGCTAAGTAGTGTTTGGGA | 4 | 2319 |
| 937442 | N/A | N/A | 4776 | 4795 | AATCTAATTTTTAAGCCTAG | 65 | 2320 |
| 937454 | N/A | N/A | 6855 | 6874 | CTTTCAGATGAAAAAGAAAG | 99 | 2321 |
| 937466 | N/A | N/A | 9235 | 9254 | GGTAACAGTAACATCATAGA | 13 | 2322 |
| 937478 | N/A | N/A | 10346 | 10365 | ATGATCTTGTGTATATATTA | 9 | 2323 |
| 937490 | N/A | N/A | 11385 | 11404 | CGTAAGTACAGAACCACATA | 34 | 2324 |
| 937502 | N/A | N/A | 16613 | 16632 | CTAATGTGTTTCACAATCTA | 58 | 2325 |
| 937514 | N/A | N/A | 17511 | 17530 | TTCTGGACACCAAGGTGGGT | 80 | 2326 |
| 937526 | N/A | N/A | 19926 | 19945 | CATTACGACCATTCTGCTCA | 31 | 2327 |
| 937538 | N/A | N/A | 21223 | 21242 | GAATTCGAGGTTACACAGTT | 45 | 2328 |
| 937550 | N/A | N/A | 23395 | 23414 | TTGTCTACAGTAGCATACAG | 47 | 2329 |
| 937562 | N/A | N/A | 27188 | 27207 | CTCTGTCGCCTGGGATGGTA | 89 | 2330 |
| 937574 | N/A | N/A | 28086 | 28105 | AAGCAAAGACTTTGAAATCT | 38 | 2331 |
| 937586 | N/A | N/A | 28814 | 28833 | AGTGAGTTCCATACTCTAAT | 73 | 2332 |
| 937598 | N/A | N/A | 29042 | 29061 | CAGTAATTAAGAATAAAATG | 134 | 2333 |
| 937610 | N/A | N/A | 32328 | 32347 | ATATTCCATACAGATCGCAT | 19 | 2334 |
| 937622 | N/A | N/A | 32798 | 32817 | CTTCTTGTTGTTGTTTACAT | 22 | 2335 |
| 937634 | N/A | N/A | 32811 | 32830 | TTCCAATTTCAGACTTCTTG | 15 | 2336 |
| 937646 | N/A | N/A | 33812 | 33831 | TGTTTGTCTGTCTTATTCAC | 31 | 2337 |
| 937658 | N/A | N/A | 36314 | 36333 | GTGCTCTCTTTGCGCCTGTG | 22 | 2338 |
| 937670 | N/A | N/A | 36853 | 36872 | TGAATCAGTATTTACTACTT | 37 | 2339 |
| 937682 | N/A | N/A | 38658 | 38677 | AATGGGATAAATATATACAA | 75 | 2340 |
| 937694 | N/A | N/A | 41726 | 41745 | AAGAGTTAATGATGCTTTCA | 29 | 2341 |
| 937706 | N/A | N/A | 45475 | 45494 | AAGTAAAATAGCCTACTGGA | 78 | 2342 |
| 937718 | N/A | N/A | 48284 | 48303 | AATACTTAAGTCACTTACAT | 92 | 2343 |
| 937730 | N/A | N/A | 49049 | 49068 | AAAAATCCTCATATCTAAAT | 98 | 2344 |
| 937742 | N/A | N/A | 49167 | 49186 | TGTTAGGAATTCTTTAGCTC | 24 | 2345 |
| 937754 | N/A | N/A | 50792 | 50811 | TCCAAGTAACAGTGTAGAAG | 4 | 2346 |
| 937766 | N/A | N/A | 52956 | 52975 | CAGTTGCCAATTCTGAGACA | 73 | 2347 |
| 937778 | N/A | N/A | 55537 | 55556 | AGTAATTCTTCAGACTAAAT | 103 | 2348 |
| 937790 | N/A | N/A | 57468 | 57487 | AGTTTCACTAGGTTCTCAAA | 41 | 2349 |
| 937802 | N/A | N/A | 58557 | 58576 | TCTTTCTTTTAATCTCAATA | 50 | 2350 |
| 937814 | N/A | N/A | 60511 | 60530 | TTTTGTTTAATCACAGTTTT | 65 | 2351 |
| 937826 | N/A | N/A | 63945 | 63964 | AACAAACAGAGAGGAACTGC | 68 | 2352 |
| 937838 | N/A | N/A | 68930 | 68949 | AGAATCCACAGATCCAGGTG | 46 | 2353 |
| 937850 | N/A | N/A | 69823 | 69842 | ATGGGCCCCTTCAATATTTT | 75 | 2354 |
| 937862 | N/A | N/A | 73009 | 73028 | GAAAACACAGAAGTGTGATT | 100 | 2355 |
| 937874 | N/A | N/A | 74344 | 74363 | CAGTACTGTAAGTTGCCACT | 78 | 2356 |
| 937886 | N/A | N/A | 81784 | 81803 | ATTTCCTTTAAATACCTAGT | 55 | 2357 |
| 937898 | N/A | N/A | 82355 | 82374 | ACTATCAACTGCCACTGCTG | 77 | 2358 |
| 937910 | N/A | N/A | 82849 | 82868 | TGGCTCCAATATCGGCAATG | 43 | 2359 |
| 937922 | N/A | N/A | 82961 | 82980 | ATGGCTGATTCCATCAATCT | 76 | 2360 |
| 937934 | N/A | N/A | 83785 | 83804 | ACATAGGTTAGAATTTTCCA | 10 | 2361 |
| 937946 | N/A | N/A | 83992 | 84011 | GTTTCTTTTACTTAAGTTGC | 21 | 2362 |
| 937958 | N/A | N/A | 84403 | 84422 | CATATATTTCTCAGCCCCCT | 54 | 2363 |
| 937970 | N/A | N/A | 84703 | 84722 | TAGAGTTTGTGACTCCTGTG | 83 | 2364 |
| 937982 | N/A | N/A | 84773 | 84792 | TGAACCCAGAACTCAGTTTG | 74 | 2365 |
| 937994 | N/A | N/A | 84921 | 84940 | TAAATCACAATAATTCCTAC | 100 | 2366 |
| 938006 | N/A | N/A | 85155 | 85174 | TTGATTTGTGATAAGTTTTA | 45 | 2367 |
| 938018 | N/A | N/A | 85199 | 85218 | CAAAAATGATTTCTTGTACA | 74 | 2368 |
| 938030 | N/A | N/A | 95476 | 95495 | TTAACGGTTGCTTAGGGTTG | 24 | 2369 |
| 938042 | N/A | N/A | 97620 | 97639 | AGACTTTTTATGTTGCTCCT | 15 | 2370 |
| 938054 | N/A | N/A | 98577 | 98596 | AGCAATTCTTACACAAATAA | 67 | 2371 |
| 938066 | N/A | N/A | 100145 | 100164 | TCAGTATAGGCAAACCAATT | 82 | 2372 |
| 938078 | N/A | N/A | 107363 | 107382 | AAGTTAAAAAGCGGGCAGAT | 64 | 2373 |
| 938090 | N/A | N/A | 111222 | 111241 | CTGGGCCTAGTCAGCTTGGA | 92 | 2374 |
| 938102 | N/A | N/A | 118404 | 118423 | ACCCAAAAAAACACATTGAG | 83 | 2375 |
| 938114 | N/A | N/A | 119032 | 119051 | CAAAAAGTTCCCATTGCATT | 50 | 2376 |
| 938126 | N/A | N/A | 123992 | 124011 | CAATATTCTGAGAAAGGACT | 53 | 2377 |
| 938138 | N/A | N/A | 125932 | 125951 | TAATTATAGAGTTCATATGG | 54 | 2378 |
| 938150 | N/A | N/A | 129788 | 129807 | TTACTTATTACCTTCCTGTA | 61 | 2379 |
| 938162 | N/A | N/A | 130897 | 130916 | AAAAAAGCAGACTGCCTATT | 107 | 2380 |
| 938174 | N/A | N/A | 132166 | 132185 | TTTTTGCTTATTATTCTCAC | 11 | 2381 |
| 938186 | N/A | N/A | 132523 | 132542 | CATGTAGTTACATGTAACCA | 40 | 2382 |
| 938198 | N/A | N/A | 133814 | 133833 | GGCTGTTTCAAAACCAATGA | 42 | 2383 |
| 938210 | N/A | N/A | 135083 | 135102 | GGTCAAGGTCAATACTTTTT | 7 | 2384 |
| 938222 | N/A | N/A | 137933 | 137952 | GCTGTCCAAGATAATGACCT | 82 | 2385 |
| 938234 | N/A | N/A | 139269 | 139288 | TTAATTTGTAACTAGGTTTT | 73 | 2386 |
| 938246 | N/A | N/A | 141230 | 141249 | CCCCTACTGTTAAACCATTA | 112 | 2387 |
| 938258 | N/A | N/A | 144253 | 144272 | ATGTCTGACAACCTCCATCG | 92 | 2388 |
| 938270 | N/A | N/A | 146666 | 146685 | CAGAACCTAAACTTTGCAGG | 57 | 2389 |

TABLE 33
Percent control of human ATXN2 RNA with 5-10-5 MOE gapmers
with mixed internucleoside linkages

| | SEQ ID | SEQ ID | SEQ ID | SEQ ID | | | |
|---|---|---|---|---|---|---|---|
| | NO: 1 | NO: 1 | NO: 2 | NO: 2 | | | |
| Compound | Start | Stop | Start | Stop | | ATXN2 % | SEQ |
| Number | Site | Site | Site | Site | Sequence (5′ to 3′) | control | ID NO |
| 708199 | 1477 | 1496 | 81637 | 81656 | GCTAACTGGTTTGCCCTTGC | 18 | 32 |
| 937362 | 894 | 913 | 45748 | 45767 | CTTTGTTACTGTTTCGACCT | 36 | 2390 |
| 937372 | 2455 | 2474 | 91725 | 91744 | GTTTCATTGGGTTTAATATT | 21 | 2391 |
| 937384 | 4395 | 4414 | 149146 | 149165 | TGTTCATGACTTTCAAGGGT | 18 | 2392 |
| 937395 | 4415 | 4434 | 149166 | 149185 | ACTTCTTTTGCTAGCTGATG | 21 | 2393 |
| 937407 | N/A | N/A | 3132 | 3151 | GGGAGGCCGCCCGCTCCCTC | 108 | 2394 |
| 937419 | N/A | N/A | 4093 | 4112 | TTTCCTTCTCCCTTTGAACA | 50 | 2395 |
| 937431 | N/A | N/A | 4652 | 4671 | ACATCCTTTTCTATAAAAGT | 53 | 2396 |
| 937443 | N/A | N/A | 4898 | 4917 | GAAAAATCTAAATTAACCTT | 97 | 2397 |
| 937455 | N/A | N/A | 6965 | 6984 | GGAATGTAGAAGAAGAAGAG | 72 | 2398 |
| 937467 | N/A | N/A | 9927 | 9946 | GAGTTTTTGCCTTCCATTTT | 12 | 2399 |
| 937479 | N/A | N/A | 10347 | 10366 | CATGATCTTGTGTATATATT | 13 | 2400 |
| 937491 | N/A | N/A | 12994 | 13013 | ACAGCTGTGACAAGTTTTCA | 63 | 2401 |
| 937503 | N/A | N/A | 16634 | 16653 | AAAAATGCTTGTCATAATCC | 44 | 2402 |
| 937515 | N/A | N/A | 18265 | 18284 | AAGTGCCAACCATTCAAGAA | 31 | 2403 |
| 937527 | N/A | N/A | 19927 | 19946 | TCATTACGACCATTCTGCTC | 70 | 2404 |
| 937539 | N/A | N/A | 21520 | 21539 | TGACCAATGCTCCTCTCTGC | 53 | 2405 |
| 937551 | N/A | N/A | 24044 | 24063 | AACCAGTAAGTTAAGGTAAA | 65 | 2406 |
| 937563 | N/A | N/A | 27762 | 27781 | CCAGAAAAAATGGCCACTAC | 58 | 2407 |
| 937575 | N/A | N/A | 28087 | 28106 | AAAGCAAAGACTTTGAAATC | 90 | 2408 |
| 937587 | N/A | N/A | 28884 | 28903 | TGTTCAGTGTCCTTCTAGCC | 41 | 2409 |
| 937599 | N/A | N/A | 30084 | 30103 | CAGTGAGGAAGGAGACCATC | 51 | 2410 |
| 937611 | N/A | N/A | 32330 | 32349 | TAATATTCCATACAGATCGC | 12 | 2411 |
| 937623 | N/A | N/A | 32799 | 32818 | ACTTCTTGTTGTTGTTTACA | 24 | 2412 |
| 937635 | N/A | N/A | 32812 | 32831 | CTTCCAATTTCAGACTTCTT | 20 | 2413 |
| 937647 | N/A | N/A | 33813 | 33832 | ATGTTTGTCTGTCTTATTCA | 22 | 2414 |
| 937659 | N/A | N/A | 36315 | 36334 | TGTGCTCTCTTTGCGCCTGT | 27 | 2415 |
| 937671 | N/A | N/A | 36854 | 36873 | ATGAATCAGTATTTACTACT | 42 | 2416 |
| 937683 | N/A | N/A | 38876 | 38895 | GCATCACTACTTGGTAACAC | 15 | 2417 |
| 937695 | N/A | N/A | 42730 | 42749 | TTTACCATTCTGTCTACTTT | 70 | 2418 |
| 937707 | N/A | N/A | 45616 | 45635 | AGAGCTCACCTAATATTAAG | 105 | 2419 |
| 937719 | N/A | N/A | 48304 | 48323 | CTTCAGATACCGAATTACAT | 61 | 2420 |
| 937731 | N/A | N/A | 49069 | 49088 | TATTATCCATTCCATCATTT | 55 | 2421 |
| 937743 | N/A | N/A | 49174 | 49193 | TAAAATTTGTTAGGAATTCT | 87 | 2422 |
| 937755 | N/A | N/A | 50918 | 50937 | AGAACACTGTGCTTTCATCA | 38 | 2423 |
| 937767 | N/A | N/A | 52985 | 53004 | CAAATGATAACAGCAGAGAC | 100 | 2424 |
| 937779 | N/A | N/A | 55654 | 55673 | AGAAGATAAATTTGTAGATA | 82 | 2425 |
| 937791 | N/A | N/A | 57469 | 57488 | CAGTTTCACTAGGTTCTCAA | 14 | 2426 |
| 937803 | N/A | N/A | 58599 | 58618 | ATTCTGTTTAGCTTTCCATT | 37 | 2427 |
| 937815 | N/A | N/A | 61017 | 61036 | TTTCTACTTTTCCCAGTTTG | 63 | 2428 |
| 937827 | N/A | N/A | 64531 | 64550 | CAGGATTATGTATAAATCAA | 41 | 2429 |
| 937839 | N/A | N/A | 68933 | 68952 | TTGAGAATCCACAGATCCAG | 78 | 2430 |
| 937851 | N/A | N/A | 69849 | 69868 | GGGATTCTTAGCCTTTTTCT | 73 | 2431 |
| 937863 | N/A | N/A | 73122 | 73141 | AATGCTACATTTTAATCTTA | 71 | 2432 |
| 937875 | N/A | N/A | 74437 | 74456 | CCCATAGGGTACCACCTACT | 95 | 2433 |
| 937887 | N/A | N/A | 81832 | 81851 | ACCGTCTCACACAGACCTTG | 66 | 2434 |
| 937899 | N/A | N/A | 82395 | 82414 | TTAGCATGACATGCCAAGTC | 58 | 2435 |
| 937911 | N/A | N/A | 82850 | 82869 | ATGGCTCCAATATCGGCAAT | 39 | 2436 |
| 937923 | N/A | N/A | 82991 | 83010 | GTGCTCATTCTCATCCCACT | 29 | 2437 |
| 937935 | N/A | N/A | 83786 | 83805 | CACATAGGTTAGAATTTTCC | 24 | 2438 |
| 937947 | N/A | N/A | 84055 | 84074 | ACAAGATATATTCAACCTAG | 35 | 2439 |
| 937959 | N/A | N/A | 84404 | 84423 | TCATATATTTCTCAGCCCCC | 51 | 2440 |
| 937971 | N/A | N/A | 84743 | 84762 | AAGCAAGTCCCATTTAAGTA | 26 | 2441 |
| 937983 | N/A | N/A | 84800 | 84819 | ATCTATGATTTTCATCAGGT | 6 | 2442 |
| 937995 | N/A | N/A | 84951 | 84970 | ATATAACATACACTAGATAA | 99 | 2443 |
| 938007 | N/A | N/A | 85169 | 85188 | TTGAGGACAGTCATTTGATT | 57 | 2444 |
| 938019 | N/A | N/A | 85287 | 85306 | CACCTGACAGAACAAATGAT | 103 | 2445 |
| 938031 | N/A | N/A | 95719 | 95738 | AGAACACCACAAATAGCTAC | 67 | 2446 |
| 938043 | N/A | N/A | 97622 | 97641 | TAAGACTTTTTATGTTGCTC | 6 | 2447 |
| 938055 | N/A | N/A | 98657 | 98676 | ATGTATAGAGGCCAACATTC | 85 | 2448 |
| 938067 | N/A | N/A | 100218 | 100237 | AACAAGCTAAAGAGAAACCT | 114 | 2449 |
| 938079 | N/A | N/A | 108591 | 108610 | GTCTCTCAATAGCAGAAATG | 89 | 2450 |
| 938091 | N/A | N/A | 111368 | 111387 | TGGGCAGTCTATACGGAATT | 52 | 2451 |
| 938103 | N/A | N/A | 118784 | 118803 | CGAAAATTAAGAGTTTTAGT | 83 | 2452 |
| 938115 | N/A | N/A | 119033 | 119052 | ACAAAAAGTTCCCATTGCAT | 56 | 2453 |
| 938127 | N/A | N/A | 124091 | 124110 | AAGCATGAACCTTAAGAGAA | 58 | 2454 |
| 938139 | N/A | N/A | 126290 | 126309 | AAAAGTTACCACAATATGAA | 86 | 2455 |
| 938151 | N/A | N/A | 129789 | 129808 | GTTACTTATTACCTTCCTGT | 14 | 2456 |
| 938163 | N/A | N/A | 131674 | 131693 | GTTCATCTTTTCCTTCAGAT | 10 | 2457 |
| 938175 | N/A | N/A | 132167 | 132186 | TTTTTTGCTTATTATTCTCA | 19 | 2458 |
| 938187 | N/A | N/A | 132524 | 132543 | CCATGTAGTTACATGTAACC | 48 | 2459 |
| 938199 | N/A | N/A | 133894 | 133913 | CCCACTGCTCTTCAAATGGA | 68 | 2460 |
| 938211 | N/A | N/A | 136171 | 136190 | AGAGTAGATGTGAGGCTGGG | 105 | 2461 |
| 938223 | N/A | N/A | 137934 | 137953 | TGCTGTCCAAGATAATGACC | 85 | 2462 |
| 938235 | N/A | N/A | 139270 | 139289 | TTTAATTTGTAACTAGGTTT | 42 | 2463 |
| 938247 | N/A | N/A | 141590 | 141609 | AAGTAGCTAATACGGTGGAC | 30 | 2464 |
| 938259 | N/A | N/A | 144271 | 144290 | GGAGCATGTACACAACCGAT | 108 | 2465 |
| 938271 | N/A | N/A | 146726 | 146745 | GACCAAACCGGCTTCCCTCC | 94 | 2466 |

TABLE 34
Percent control of human ATXN2 RNA with 5-10-5 MOE gapmers
with mixed internucleoside linkages

| | SEQ ID | SEQ ID | SEQ ID | SEQ ID | | | |
|---|---|---|---|---|---|---|---|
| | NO: 1 | NO: 1 | NO: 2 | NO: 2 | | | |
| Compound | Start | Stop | Start | Stop | | ATXN2 % | SEQ |
| Number | Site | Site | Site | Site | Sequence (5′ to 3′) | control | ID NO |
| 708199 | 1477 | 1496 | 81637 | 81656 | GCTAACTGGTTTGCCCTTGC | 21 | 32 |
| 937363 | 1075 | 1094 | 49249 | 49268 | TTCTCATGTGCGGCATCAAG | 35 | 2467 |
| 937373 | 2456 | 2475 | 91726 | 91745 | TGTTTCATTGGGTTTAATAT | 33 | 2468 |
| 937385 | 4396 | 4415 | 149147 | 149166 | GTGTTCATGACTTTCAAGGG | 11 | 2469 |
| 937396 | 4416 | 4435 | 149167 | 149186 | TACTTCTTTTGCTAGCTGAT | 23 | 2470 |
| 937408 | N/A | N/A | 3161 | 3180 | CGAGAACCCCTCCCAACACG | 128 | 2471 |
| 937420 | N/A | N/A | 4094 | 4113 | GTTTCCTTCTCCCTTTGAAC | 14 | 2472 |
| 937432 | N/A | N/A | 4744 | 4763 | CTTAATAACCTTAGTTTTAA | 102 | 2473 |
| 937444 | N/A | N/A | 5108 | 5127 | TAAGTGAGGAGATTCTAGAA | 56 | 2474 |
| 937456 | N/A | N/A | 7006 | 7025 | GTAACAATTGTAAATCCATA | 10 | 2475 |
| 937468 | N/A | N/A | 9928 | 9947 | AGAGTTTTTGCCTTCCATTT | 9 | 2476 |
| 937480 | N/A | N/A | 10348 | 10367 | GCATGATCTTGTGTATATAT | 8 | 2477 |
| 937492 | N/A | N/A | 13405 | 13424 | TCACTTGACACAACTTCAGG | 58 | 2478 |
| 937504 | N/A | N/A | 17153 | 17172 | ATTACAATGCGGTATATATA | 32 | 2479 |
| 937516 | N/A | N/A | 18278 | 18297 | TGACCAAGCAGTTAAGTGCC | 45 | 2480 |
| 937528 | N/A | N/A | 19929 | 19948 | CATCATTACGACCATTCTGC | 42 | 2481 |
| 937540 | N/A | N/A | 22556 | 22575 | ACAGTTTAGCAATTACTTTT | 23 | 2482 |
| 937552 | N/A | N/A | 24447 | 24466 | GCAAATATTTCCAAACAAGT | 13 | 2483 |
| 937564 | N/A | N/A | 28019 | 28038 | AAAGGCAATTTCCTTAATTT | 47 | 2484 |
| 937576 | N/A | N/A | 28162 | 28181 | GCTCCCAGCCTTCTTCACTG | 76 | 2485 |
| 937588 | N/A | N/A | 28885 | 28904 | TTGTTCAGTGTCCTTCTAGC | 24 | 2486 |
| 937600 | N/A | N/A | 30151 | 30170 | CTCGAATGGCAGAACAATGA | 57 | 2487 |
| 937612 | N/A | N/A | 32331 | 32350 | GTAATATTCCATACAGATCG | 33 | 2488 |
| 937624 | N/A | N/A | 32800 | 32819 | GACTTCTTGTTGTTGTTTAC | 21 | 2489 |
| 937636 | N/A | N/A | 32813 | 32832 | TCTTCCAATTTCAGACTTCT | 24 | 2490 |
| 937648 | N/A | N/A | 33814 | 33833 | TATGTTTGTCTGTCTTATTC | 32 | 2491 |
| 937660 | N/A | N/A | 36316 | 36335 | ATGTGCTCTCTTTGCGCCTG | 41 | 2492 |
| 937672 | N/A | N/A | 36855 | 36874 | CATGAATCAGTATTTACTAC | 35 | 2493 |
| 937684 | N/A | N/A | 41272 | 41291 | GGGACTAGAGCATCCATAAA | 52 | 2494 |
| 937696 | N/A | N/A | 43208 | 43227 | TGCTTTTAATAGTTGCCAAA | 43 | 2495 |
| 937708 | N/A | N/A | 47531 | 47550 | TACCCCCAAGGCAGTTTATC | 109 | 2496 |
| 937720 | N/A | N/A | 48512 | 48531 | GAACTCTTGAAATTCTTCAG | 37 | 2497 |
| 937732 | N/A | N/A | 49142 | 49161 | GGTACCAGTTCTTATATGCC | 67 | 2498 |
| 937744 | N/A | N/A | 49194 | 49213 | TACTCCAAACCTTTACAAAA | 94 | 2499 |
| 937756 | N/A | N/A | 50938 | 50957 | ATTTGAGAAGATTCAAAAAC | 84 | 2500 |
| 937768 | N/A | N/A | 53154 | 53173 | CTTAATAATTTGACAGACTA | 64 | 2501 |
| 937780 | N/A | N/A | 55995 | 56014 | ACTAAAACCAGAGGAAAAAT | 89 | 2502 |
| 937792 | N/A | N/A | 57472 | 57491 | ACACAGTTTCACTAGGTTCT | 11 | 2503 |
| 937804 | N/A | N/A | 58742 | 58761 | AGTTATTGTTCTGACTTTGG | 14 | 2504 |
| 937816 | N/A | N/A | 61164 | 61183 | GCAAGCTGATAGACAATCAT | 71 | 2505 |
| 937828 | N/A | N/A | 65549 | 65568 | TAAACAACAGTGGCCACTGA | 92 | 2506 |
| 937840 | N/A | N/A | 69102 | 69121 | GTTCTATAGGTGCTTAAGTC | 38 | 2507 |
| 937852 | N/A | N/A | 69978 | 69997 | CACAGTTAAGGGTGCAGGAT | 45 | 2508 |
| 937864 | N/A | N/A | 73447 | 73466 | AAATTAAAGCTCGAAGCAGC | 92 | 2509 |
| 937876 | N/A | N/A | 74496 | 74515 | GGGCAATGATGGCACTAGGA | 51 | 2510 |
| 937888 | N/A | N/A | 81875 | 81894 | TACCTAAGCTATATTAAAGG | 96 | 2511 |
| 937900 | N/A | N/A | 82425 | 82444 | TCACCCCATCTCCTTCCAAC | 86 | 2512 |
| 937912 | N/A | N/A | 82851 | 82870 | CATGGCTCCAATATCGGCAA | 35 | 2513 |
| 937924 | N/A | N/A | 83053 | 83072 | TCTAACCTCTGGACTGTCCC | 68 | 2514 |
| 937936 | N/A | N/A | 83787 | 83806 | GCACATAGGTTAGAATTTTC | 4 | 2515 |
| 937948 | N/A | N/A | 84087 | 84106 | TATCCCTGATTTATGGAAAA | 79 | 2516 |
| 937960 | N/A | N/A | 84405 | 84424 | ATCATATATTTCTCAGCCCC | 39 | 2517 |
| 937972 | N/A | N/A | 84753 | 84772 | GAATCTTATTAAGCAAGTCC | 8 | 2518 |
| 937984 | N/A | N/A | 84810 | 84829 | CCTTACAATTATCTATGATT | 48 | 2519 |
| 937996 | N/A | N/A | 85039 | 85058 | CTATACACACTATTGAAGAA | 58 | 2520 |
| 938008 | N/A | N/A | 85179 | 85198 | TTTTAACCCTTTGAGGACAG | 51 | 2521 |
| 938020 | N/A | N/A | 85288 | 85307 | ACACCTGACAGAACAAATGA | 91 | 2522 |
| 938032 | N/A | N/A | 95819 | 95838 | CAACTCCTAGGTAGGTACAC | 41 | 2523 |
| 938044 | N/A | N/A | 97623 | 97642 | ATAAGACTTTTTATGTTGCT | 18 | 2524 |
| 938056 | N/A | N/A | 98775 | 98794 | AAACACTTTATAGGCAATAT | 56 | 2525 |
| 938068 | N/A | N/A | 101519 | 101538 | AATCAGTTTATTGAAGGAAT | 88 | 2526 |
| 938080 | N/A | N/A | 108675 | 108694 | GAGACTGCAATAATTATTAG | 85 | 2527 |
| 938092 | N/A | N/A | 112470 | 112489 | GTTTCTCAGTAAAGTGTCAG | 86 | 2528 |
| 938104 | N/A | N/A | 118926 | 118945 | ACCCACTTTCTTCTCAGAAT | 87 | 2529 |
| 938116 | N/A | N/A | 119657 | 119676 | CAAAAGCATTACTCATTGCC | 61 | 2530 |
| 938128 | N/A | N/A | 124624 | 124643 | ATACAATACAGTCAACTGAA | 112 | 2531 |
| 938140 | N/A | N/A | 127721 | 127740 | AAAAACTAAGGGAAAAACTG | 85 | 2532 |
| 938152 | N/A | N/A | 129791 | 129810 | TTGTTACTTATTACCTTCCT | 27 | 2533 |
| 938164 | N/A | N/A | 131723 | 131742 | GTAGAAACTATTTGCCAAAA | 44 | 2534 |
| 938176 | N/A | N/A | 132216 | 132235 | AAGTTGATCTACACAAATTT | 69 | 2535 |
| 938188 | N/A | N/A | 132525 | 132544 | CCCATGTAGTTACATGTAAC | 46 | 2536 |
| 938200 | N/A | N/A | 133952 | 133971 | GTTTTGTTTGCAACATTTCC | 50 | 2537 |
| 938212 | N/A | N/A | 136441 | 136460 | TATTTGAGTGTATTTAAATA | 91 | 2538 |
| 938224 | N/A | N/A | 138034 | 138053 | TACCTTAAAAGTTCATTTCC | 64 | 2539 |
| 938236 | N/A | N/A | 139272 | 139291 | TGTTTAATTTGTAACTAGGT | 20 | 2540 |
| 938248 | N/A | N/A | 142489 | 142508 | TCTGAATGTTTTTAAGAGTA | 37 | 2541 |
| 938260 | N/A | N/A | 145644 | 145663 | GAAAGTTGGCTAAAGCTGGT | 84 | 2542 |
| 938272 | N/A | N/A | 146738 | 146757 | CTGGCCCACACGGACCAAAC | 100 | 2543 |

TABLE 35
Percent control of human ATXN2 RNA with 5-10-5 MOE gapmers
with mixed internucleoside linkages

| | SEQ ID | SEQ ID | SEQ ID | SEQ ID | | | |
|---|---|---|---|---|---|---|---|
| | NO: 1 | NO: 1 | NO: 2 | NO: 2 | | | |
| Compound | Start | Stop | Start | Stop | | ATXN2 % | SEQ |
| Number | Site | Site | Site | Site | Sequence (5′ to 3′) | control | ID NO |
| 708151 | 1084 | 1103 | 49258 | 49277 | TCTGTACTTTTCTCATGTGC | 50 | 2544 |
| 708199 | 1477 | 1496 | 81637 | 81656 | GCTAACTGGTTTGCCCTTGC | 32 | 32 |
| 937375 | 2467 | 2486 | 91737 | 91756 | AAGCTAGGTGATGTTTCATT | 55 | 2545 |
| 937387 | 4399 | 4418 | 149150 | 149169 | GATGTGTTCATGACTTTCAA | 36 | 2546 |
| 937398 | 4419 | 4438 | 149170 | 149189 | TGTTACTTCTTTTGCTAGCT | 49 | 2547 |
| 937410 | N/A | N/A | 3453 | 3472 | CGATCTTTCCCAGGACTCGG | 87 | 2548 |
| 937422 | N/A | N/A | 4526 | 4545 | AGTGTTTGGGATGCTTCAGA | 6 | 2549 |
| 937434 | N/A | N/A | 4746 | 4765 | AACTTAATAACCTTAGTTTT | 86 | 2550 |
| 937446 | N/A | N/A | 5301 | 5320 | CACTTCTGAAAGTCATGAAA | 53 | 2551 |
| 937458 | N/A | N/A | 7351 | 7370 | AATTTAAATGGAAGCATGAT | 82 | 2552 |
| 937470 | N/A | N/A | 9930 | 9949 | TTAGAGTTTTTGCCTTCCAT | 5 | 2553 |
| 937482 | N/A | N/A | 10351 | 10370 | ACAGCATGATCTTGTGTATA | 30 | 2554 |
| 937494 | N/A | N/A | 13774 | 13793 | GTTAGCTATTAATCATGGCA | 20 | 2555 |
| 937506 | N/A | N/A | 17155 | 17174 | GAATTACAATGCGGTATATA | 22 | 2556 |
| 937518 | N/A | N/A | 18682 | 18701 | CCAGTATCTCAGTTTTTTTT | 35 | 2557 |
| 937530 | N/A | N/A | 19932 | 19951 | GCGCATCATTACGACCATTC | 50 | 2558 |
| 937542 | N/A | N/A | 23248 | 23267 | ATTTTTACTCACCTTTTCTA | 80 | 2559 |
| 937554 | N/A | N/A | 24984 | 25003 | ATAAACACAGGGTAGGCCAG | 96 | 2560 |
| 937566 | N/A | N/A | 28077 | 28096 | CTTTGAAATCTCACAAGGTT | 60 | 2561 |
| 937578 | N/A | N/A | 28492 | 28511 | GGATTGTTTTCTTCATTATT | 16 | 2562 |
| 937590 | N/A | N/A | 28887 | 28906 | TCTTGTTCAGTGTCCTTCTA | 21 | 2563 |
| 937602 | N/A | N/A | 30535 | 30554 | AAATAACTTGCCTTACATCA | 62 | 2564 |
| 937614 | N/A | N/A | 32333 | 32352 | AAGTAATATTCCATACAGAT | 34 | 2565 |
| 937626 | N/A | N/A | 32802 | 32821 | CAGACTTCTTGTTGTTGTTT | 28 | 2566 |
| 937638 | N/A | N/A | 32815 | 32834 | GTTCTTCCAATTTCAGACTT | 34 | 2567 |
| 937650 | N/A | N/A | 35590 | 35609 | AAATGTTTTCATAACTGCTA | 54 | 2568 |
| 937662 | N/A | N/A | 36318 | 36337 | ACATGTGCTCTCTTTGCGCC | 76 | 2569 |
| 937674 | N/A | N/A | 37450 | 37469 | AACAACCAAGCTTGGCAAAA | 67 | 2570 |
| 937686 | N/A | N/A | 41274 | 41293 | GAGGGACTAGAGCATCCATA | 53 | 2571 |
| 937698 | N/A | N/A | 43423 | 43442 | CCACTGAAGTCTAAATTCTT | 82 | 2572 |
| 937710 | N/A | N/A | 47568 | 47587 | TTTATCCACATTTTAACTTC | 74 | 2573 |
| 937722 | N/A | N/A | 48559 | 48578 | TTCACTAACAAAACAATAAA | 97 | 2574 |
| 937734 | N/A | N/A | 49148 | 49167 | CATCAAGGTACCAGTTCTTA | 22 | 2575 |
| 937746 | N/A | N/A | 49874 | 49893 | ATTTTTCTCTAAAGTTCTAA | 76 | 2576 |
| 937758 | N/A | N/A | 51327 | 51346 | AGGAATGGACTATCACAAAC | 40 | 2577 |
| 937770 | N/A | N/A | 54510 | 54529 | TTCCCCAGCAGCCGAGTGTG | 83 | 2578 |
| 937782 | N/A | N/A | 56810 | 56829 | TAATGGCTAGAAGAATTCAG | 83 | 2579 |
| 937794 | N/A | N/A | 57474 | 57493 | GTACACAGTTTCACTAGGTT | 4 | 2580 |
| 937806 | N/A | N/A | 58825 | 58844 | CACACAGTATTTTTTTATCG | 72 | 2581 |
| 937818 | N/A | N/A | 61266 | 61285 | CTACTTGTTTTACTTAAACC | 86 | 2582 |
| 937830 | N/A | N/A | 67096 | 67115 | TCCAGAAAAGTTTAATGCAT | 94 | 2583 |
| 937842 | N/A | N/A | 69104 | 69123 | GAGTTCTATAGGTGCTTAAG | 30 | 2584 |
| 937854 | N/A | N/A | 71512 | 71531 | CTATATAAAGTATCAGTATA | 153 | 2585 |
| 937866 | N/A | N/A | 73688 | 73707 | AACCTACCTTAAGATCCTGA | 86 | 2586 |
| 937878 | N/A | N/A | 74727 | 74746 | AAGTTCAGGCCCTACAGTAT | 87 | 2587 |
| 937890 | N/A | N/A | 81996 | 82015 | GGATTGCTCACCGTGATATA | 30 | 2588 |
| 937902 | N/A | N/A | 82458 | 82477 | GTCTCAGCCAGTCCTCAATG | 39 | 2589 |
| 937914 | N/A | N/A | 82854 | 82873 | TTTCATGGCTCCAATATCGG | 39 | 2590 |
| 937926 | N/A | N/A | 83415 | 83434 | TGGTCAAAATACTTGCCTCC | 95 | 2591 |
| 937938 | N/A | N/A | 83790 | 83809 | GTTGCACATAGGTTAGAATT | 12 | 2592 |
| 937950 | N/A | N/A | 84162 | 84181 | CACTCTTTTCCCACAAAGTT | 57 | 2593 |
| 937962 | N/A | N/A | 84408 | 84427 | AGTATCATATATTTCTCAGC | 20 | 2594 |
| 937974 | N/A | N/A | 84755 | 84774 | TGGAATCTTATTAAGCAAGT | 28 | 2595 |
| 937986 | N/A | N/A | 84812 | 84831 | TTCCTTACAATTATCTATGA | 56 | 2596 |
| 937998 | N/A | N/A | 85050 | 85069 | TTAATTAGGATCTATACACA | 75 | 2597 |
| 938010 | N/A | N/A | 85181 | 85200 | CATTTTAACCCTTTGAGGAC | 83 | 2598 |
| 938022 | N/A | N/A | 92150 | 92169 | AGTAATGCTTATTTTCTAAA | 40 | 2599 |
| 938034 | N/A | N/A | 96348 | 96367 | AAACAGTATTTTCTTAGATA | 104 | 2600 |
| 938046 | N/A | N/A | 97625 | 97644 | AGATAAGACTTTTTATGTTG | 58 | 2601 |
| 938058 | N/A | N/A | 99151 | 99170 | TTAACTCATGGCAACCACCG | 86 | 2602 |
| 938070 | N/A | N/A | 104058 | 104077 | TACATCTTAACAGAATAAAA | 95 | 2603 |
| 938082 | N/A | N/A | 109341 | 109360 | CCCTCTAATGCATGTATGGC | 76 | 2604 |
| 938094 | N/A | N/A | 112723 | 112742 | ACTATAAACTAACAATAACA | 88 | 2605 |
| 938106 | N/A | N/A | 119023 | 119042 | CCCATTGCATTGTTTTAAGT | 30 | 2606 |
| 938118 | N/A | N/A | 120014 | 120033 | TGAAAATCTAAGGCCACATG | 87 | 2607 |
| 938130 | N/A | N/A | 124891 | 124910 | AGTATATGATGACCTCAATG | 36 | 2608 |
| 938142 | N/A | N/A | 127923 | 127942 | ACTCCTCACTGAAAGTACAC | 76 | 2609 |
| 938154 | N/A | N/A | 129793 | 129812 | CTTTGTTACTTATTACCTTC | 40 | 2610 |
| 938166 | N/A | N/A | 132157 | 132176 | ATTATTCTCACATATAAATA | 118 | 2611 |
| 938178 | N/A | N/A | 132322 | 132341 | TTTGAAGCAATCCATTAATT | 67 | 2612 |
| 938190 | N/A | N/A | 132527 | 132546 | TGCCCATGTAGTTACATGTA | 64 | 2613 |
| 938202 | N/A | N/A | 134160 | 134179 | AAGGGAATCTTGATTAACTA | 48 | 2614 |
| 938214 | N/A | N/A | 136587 | 136606 | CACACAATTTTGCAAAAACA | 77 | 2615 |
| 938226 | N/A | N/A | 138442 | 138461 | TGACAATATTAATGGCACAA | 23 | 2616 |
| 938238 | N/A | N/A | 139274 | 139293 | TGTGTTTAATTTGTAACTAG | 21 | 2617 |
| 938250 | N/A | N/A | 142909 | 142928 | AGCACAGCTTTGGGAAGAGG | 44 | 2618 |
| 938262 | N/A | N/A | 145801 | 145820 | TCCCATGACAAAACCACACA | 81 | 2619 |
| 938274 | N/A | N/A | 146800 | 146819 | CCAGCCTCTGGTAGACACCT | 68 | 2620 |

TABLE 36
Percent control of human ATXN2 RNA with 5-10-5 MOE gapmers
with mixed internucleoside linkages

| | SEQ ID | SEQ ID | SEQ ID | SEQ ID | | | |
|---|---|---|---|---|---|---|---|
| | NO: 1 | NO: 1 | NO: 2 | NO: 2 | | | |
| Compound | Start | Stop | Start | Stop | | ATXN2 % | SEQ |
| Number | Site | Site | Site | Site | Sequence (5′ to 3′) | control | ID NO |
| 708199 | 1477 | 1496 | 81637 | 81656 | GCTAACTGGTTTGCCCTTGC | 20 | 32 |
| 937366 | 1563 | 1582 | 81723 | 81742 | CTGCTGTGTATTTTTCTTCC | 21 | 2621 |
| 937378 | 3492 | 3511 | 136965 | 136984 | TTGTCTCCTTGTTGTATGGT | 14 | 2622 |
| 937390 | 4403 | 4422 | 149154 | 149173 | AGCTGATGTGTTCATGACTT | 29 | 2623 |
| 937413 | N/A | N/A | 3946 | 3965 | ACTACAACCCCGGCTTAGGA | 65 | 2624 |
| 937425 | N/A | N/A | 4529 | 4548 | AGTAGTGTTTGGGATGCTTC | 14 | 2625 |
| 937437 | N/A | N/A | 4750 | 4769 | ATGCAACTTAATAACCTTAG | 12 | 2626 |
| 937449 | N/A | N/A | 6321 | 6340 | CCCAACAATAGAATGGTTAA | 87 | 2627 |
| 937461 | N/A | N/A | 7550 | 7569 | TAGGCTGGTAATTTAATGTC | 40 | 2628 |
| 937473 | N/A | N/A | 9934 | 9953 | AAGCTTAGAGTTTTTGCCTT | 38 | 2629 |
| 937485 | N/A | N/A | 10354 | 10373 | TACACAGCATGATCTTGTGT | 85 | 2630 |
| 937497 | N/A | N/A | 14749 | 14768 | TACTTGCTGCCAATATGTAC | 83 | 2631 |
| 937509 | N/A | N/A | 17159 | 17178 | TTTTGAATTACAATGCGGTA | 14 | 2632 |
| 937521 | N/A | N/A | 18685 | 18704 | CGGCCAGTATCTCAGTTTTT | 90 | 2633 |
| 937533 | N/A | N/A | 19935 | 19954 | TGTGCGCATCATTACGACCA | 79 | 2634 |
| 937545 | N/A | N/A | 23252 | 23271 | CTGTATTTTTACTCACCTTT | 32 | 2635 |
| 937557 | N/A | N/A | 26110 | 26129 | AGTAAACATCAGCATCTCAA | 30 | 2636 |
| 937569 | N/A | N/A | 28080 | 28099 | AGACTTTGAAATCTCACAAG | 45 | 2637 |
| 937581 | N/A | N/A | 28496 | 28515 | CACCGGATTGTTTTCTTCAT | 33 | 2638 |
| 937593 | N/A | N/A | 28891 | 28910 | GAAGTCTTGTTCAGTGTCCT | 8 | 2639 |
| 937605 | N/A | N/A | 31491 | 31510 | TTCATATCACCTCTGACTTA | 76 | 2640 |
| 937617 | N/A | N/A | 32745 | 32764 | TGAATATTTTCTCCCTAAAA | 72 | 2641 |
| 937629 | N/A | N/A | 32806 | 32825 | ATTTCAGACTTCTTGTTGTT | 44 | 2642 |
| 937641 | N/A | N/A | 32819 | 32838 | TTTTGTTCTTCCAATTTCAG | 40 | 2643 |
| 937653 | N/A | N/A | 36308 | 36327 | TCTTTGCGCCTGTGTCACAT | 31 | 2644 |
| 937665 | N/A | N/A | 36847 | 36866 | AGTATTTACTACTTCTGCAT | 34 | 2645 |
| 937677 | N/A | N/A | 37662 | 37681 | TGAAAATCAGAAAATGATGC | 80 | 2646 |
| 937689 | N/A | N/A | 41279 | 41298 | TTTATGAGGGACTAGAGCAT | 68 | 2647 |
| 937701 | N/A | N/A | 44118 | 44137 | AAGTACTTCACATGCAACAT | 48 | 2648 |
| 937713 | N/A | N/A | 47686 | 47705 | CAGAGGACCAACTGTACTTT | 49 | 2649 |
| 937725 | N/A | N/A | 48823 | 48842 | GTGGCTTTAAAAACTAGGTA | 13 | 2650 |
| 937737 | N/A | N/A | 49151 | 49170 | GCTCATCAAGGTACCAGTTC | 15 | 2651 |
| 937749 | N/A | N/A | 50060 | 50079 | TCTTCCTTAGCCTTATACTT | 71 | 2652 |
| 937761 | N/A | N/A | 51975 | 51994 | AGAGACCTGATGTCCTAAAC | 53 | 2653 |
| 937773 | N/A | N/A | 55203 | 55222 | ATAGCTATGCTACAATAAAA | 97 | 2654 |
| 937785 | N/A | N/A | 57319 | 57338 | ATTCTTTCCATAAAATAATG | 96 | 2655 |
| 937797 | N/A | N/A | 58028 | 58047 | ACAATTATTTGCATCGCTGA | 61 | 2656 |
| 937809 | N/A | N/A | 60472 | 60491 | TTATTTATCAGTGTGAAGTA | 67 | 2657 |
| 937821 | N/A | N/A | 61630 | 61649 | CCCTGGCAAATATGTAAAAC | 88 | 2658 |
| 937833 | N/A | N/A | 67676 | 67695 | TTTAATCATTGTCTATGGTA | 83 | 2659 |
| 937845 | N/A | N/A | 69108 | 69127 | AACTGAGTTCTATAGGTGCT | 42 | 2660 |
| 937857 | N/A | N/A | 71901 | 71920 | ATAATGCCTCTGAAAAATCA | 107 | 2661 |
| 937869 | N/A | N/A | 73968 | 73987 | GAGCAGCAGGACTCAGCTGG | 95 | 2662 |
| 937881 | N/A | N/A | 75978 | 75997 | TTAAGCCACACGAAGCATTT | 72 | 2663 |
| 937893 | N/A | N/A | 82143 | 82162 | ACTCTACAGGTTATGCTAGC | 66 | 2664 |
| 937905 | N/A | N/A | 82586 | 82605 | TCCTCTCTCTCTTACCAGTA | 50 | 2665 |
| 937917 | N/A | N/A | 82857 | 82876 | GTTTTTCATGGCTCCAATAT | 38 | 2666 |
| 937929 | N/A | N/A | 83495 | 83514 | CACATTCATATCAGTTATGT | 25 | 2667 |
| 937941 | N/A | N/A | 83793 | 83812 | AGTGTTGCACATAGGTTAGA | 17 | 2668 |
| 937953 | N/A | N/A | 84288 | 84307 | ACTCAAGAGTGTCCATTTGG | 41 | 2669 |
| 937965 | N/A | N/A | 84412 | 84431 | CTTAAGTATCATATATTTCT | 78 | 2670 |
| 937977 | N/A | N/A | 84759 | 84778 | AGTTTGGAATCTTATTAAGC | 37 | 2671 |
| 937989 | N/A | N/A | 84817 | 84836 | GCTGGTTCCTTACAATTATC | 10 | 2672 |
| 938001 | N/A | N/A | 85053 | 85072 | GGGTTAATTAGGATCTATAC | 23 | 2673 |
| 938013 | N/A | N/A | 85185 | 85204 | TGTACATTTTAACCCTTTGA | 61 | 2674 |
| 938025 | N/A | N/A | 92639 | 92658 | ATTGGTTGGTCTCAAAATCT | 34 | 2675 |
| 938037 | N/A | N/A | 97581 | 97600 | CATTAATGAAGGTTTACAGA | 58 | 2676 |
| 938049 | N/A | N/A | 98156 | 98175 | AAACATAAGAGAATAACATT | 94 | 2677 |
| 938061 | N/A | N/A | 99778 | 99797 | GCATTTCTTACTATGGGTTG | 28 | 2678 |
| 938073 | N/A | N/A | 105409 | 105428 | ATAACACTAGAGGCCGGGCA | 85 | 2679 |
| 938085 | N/A | N/A | 109978 | 109997 | AGGGAAATACCTAGTCCTAG | 71 | 2680 |
| 938097 | N/A | N/A | 117276 | 117295 | TATCAGGCATGGAGCCACTG | 71 | 2681 |
| 938109 | N/A | N/A | 119026 | 119045 | GTTCCCATTGCATTGTTTTA | 28 | 2682 |
| 938121 | N/A | N/A | 122563 | 122582 | CCAATTCTAGGTATTTAACT | 56 | 2683 |
| 938133 | N/A | N/A | 125211 | 125230 | AGTAATGCACCAGTACAATA | 36 | 2684 |
| 938145 | N/A | N/A | 129289 | 129308 | CCAATACCTCAAAGGATTGG | 132 | 2685 |
| 938157 | N/A | N/A | 130202 | 130221 | TTCCTCACACATTTCTTACA | 75 | 2686 |
| 938169 | N/A | N/A | 132160 | 132179 | CTTATTATTCTCACATATAA | 61 | 2687 |
| 938181 | N/A | N/A | 132517 | 132536 | GTTACATGTAACCATAATCT | 51 | 2688 |
| 938193 | N/A | N/A | 133242 | 133261 | TTGAAAGTGATAATGTGGAA | 40 | 2689 |
| 938205 | N/A | N/A | 134816 | 134835 | ATGATGTAGCTTAAAAAGAA | 86 | 2690 |
| 938217 | N/A | N/A | 137025 | 137044 | ACTGTACAATTAAAAATTAG | 93 | 2691 |
| 938229 | N/A | N/A | 138943 | 138962 | ATTAAGGACCTTAGCTACTT | 93 | 2692 |
| 938241 | N/A | N/A | 139366 | 139385 | ATCAGTCAAAAATCCTTAAT | 60 | 2693 |
| 938253 | N/A | N/A | 143542 | 143561 | AACCTTGGTACAAAAACCAT | 77 | 2694 |
| 938265 | N/A | N/A | 146161 | 146180 | CAATGTCCAAGGCCAAGCCC | 99 | 2695 |
| 938277 | N/A | N/A | 147075 | 147094 | AAAGGTGATTTTAGTCAGCC | 43 | 2696 |

TABLE 37
Percent control of human ATXN2 RNA with 5-10-5 MOE gapmers
with mixed internucleoside linkages

| | SEQ ID | SEQ ID | SEQ ID | SEQ ID | | | |
|---|---|---|---|---|---|---|---|
| | NO: 1 | NO: 1 | NO: 2 | NO: 2 | | | |
| Compound | Start | Stop | Start | Stop | | ATXN2 % | SEQ |
| Number | Site | Site | Site | Site | Sequence (5′ to 3′) | control | ID NO |
| 708199 | 1477 | 1496 | 81637 | 81656 | GCTAACTGGTTTGCCCTTGC | 20 | 32 |
| 760800 | 4404 | 4423 | 149155 | 149174 | TAGCTGATGTGTTCATGACT | 36 | 2697 |
| 937367 | 1564 | 1583 | 81724 | 81743 | ACTGCTGTGTATTTTTCTTC | 32 | 2698 |
| 937379 | 3941 | 3960 | 147856 | 147875 | CATTGGCGCATGGGCAGTTG | 62 | 2699 |
| 937414 | N/A | N/A | 4008 | 4027 | TGCACAAACACACCCTCGAG | 85 | 2700 |
| 937426 | N/A | N/A | 4531 | 4550 | TAAGTAGTGTTTGGGATGCT | 18 | 2701 |
| 937438 | N/A | N/A | 4751 | 4770 | AATGCAACTTAATAACCTTA | 30 | 2702 |
| 937450 | N/A | N/A | 6450 | 6469 | CTGAAGCCCTCTGAACTAGT | 63 | 2703 |
| 937462 | N/A | N/A | 8171 | 8190 | CATTGCTAATTAGAGTAACA | 45 | 2704 |
| 937474 | N/A | N/A | 9935 | 9954 | AAAGCTTAGAGTTTTTGCCT | 16 | 2705 |
| 937486 | N/A | N/A | 10355 | 10374 | ATACACAGCATGATCTTGTG | 62 | 2706 |
| 937498 | N/A | N/A | 14825 | 14844 | GTCTTTCAACTTTCTATCAC | 45 | 2707 |
| 937510 | N/A | N/A | 17160 | 17179 | ATTTTGAATTACAATGCGGT | 13 | 2708 |
| 937522 | N/A | N/A | 19099 | 19118 | AATAAGCCATGATCACAATA | 68 | 2709 |
| 937534 | N/A | N/A | 19980 | 19999 | GGCCTATGCCTTTACCGCCA | 51 | 2710 |
| 937546 | N/A | N/A | 23254 | 23273 | CGCTGTATTTTTACTCACCT | 14 | 2711 |
| 937558 | N/A | N/A | 26524 | 26543 | TCAGAAAGCTTCTCAAACAT | 52 | 2712 |
| 937570 | N/A | N/A | 28081 | 28100 | AAGACTTTGAAATCTCACAA | 27 | 2713 |
| 937582 | N/A | N/A | 28497 | 28516 | TCACCGGATTGTTTTCTTCA | 24 | 2714 |
| 937594 | N/A | N/A | 28892 | 28911 | TGAAGTCTTGTTCAGTGTCC | 23 | 2715 |
| 937606 | N/A | N/A | 32324 | 32343 | TCCATACAGATCGCATAGCT | 33 | 2716 |
| 937618 | N/A | N/A | 32792 | 32811 | GTTGTTGTTTACATTATTAT | 9 | 2717 |
| 937630 | N/A | N/A | 32807 | 32826 | AATTTCAGACTTCTTGTTGT | 42 | 2718 |
| 937642 | N/A | N/A | 32820 | 32839 | ATTTTGTTCTTCCAATTTCA | 46 | 2719 |
| 937654 | N/A | N/A | 36309 | 36328 | CTCTTTGCGCCTGTGTCACA | 31 | 2720 |
| 937666 | N/A | N/A | 36848 | 36867 | CAGTATTTACTACTTCTGCA | 15 | 2721 |
| 937678 | N/A | N/A | 37789 | 37808 | TTCGATTATCTCAATCAAAT | 63 | 2722 |
| 937690 | N/A | N/A | 41280 | 41299 | TTTTATGAGGGACTAGAGCA | 52 | 2723 |
| 937702 | N/A | N/A | 44143 | 44162 | TTACTACAAAACCAGACACC | 91 | 2724 |
| 937714 | N/A | N/A | 47706 | 47725 | GAATATGGAACCCACAGATG | 71 | 2725 |
| 937726 | N/A | N/A | 48843 | 48862 | GAGAAGTAAAATCATTCAAA | 56 | 2726 |
| 937738 | N/A | N/A | 49153 | 49172 | TAGCTCATCAAGGTACCAGT | 8 | 2727 |
| 937750 | N/A | N/A | 50130 | 50149 | GTATGTTCTACTTCTTCACC | 27 | 2728 |
| 937762 | N/A | N/A | 52329 | 52348 | GAAAACCATGCGGCCTGGCC | 87 | 2729 |
| 937774 | N/A | N/A | 55204 | 55223 | CATAGCTATGCTACAATAAA | 77 | 2730 |
| 937786 | N/A | N/A | 57389 | 57408 | GGAACACATCCCAGAGCTCT | 45 | 2731 |
| 937798 | N/A | N/A | 58348 | 58367 | AAGACCAAAAAGACAACCAT | 122 | 2732 |
| 937810 | N/A | N/A | 60507 | 60526 | GTTTAATCACAGTTTTCTCA | 24 | 2733 |
| 937822 | N/A | N/A | 62506 | 62525 | GGAGGAAAAGCTAGCTACCT | 99 | 2734 |
| 937834 | N/A | N/A | 68516 | 68535 | AAAGCAGGATGCTACAACGC | 104 | 2735 |
| 937846 | N/A | N/A | 69109 | 69128 | TAACTGAGTTCTATAGGTGC | 48 | 2736 |
| 937858 | N/A | N/A | 71938 | 71957 | TCAGCTTCTCAATCTTTCCT | 45 | 2737 |
| 937870 | N/A | N/A | 74037 | 74056 | CTCCACCAGCAGCACTACTC | 91 | 2738 |
| 937882 | N/A | N/A | 76079 | 76098 | TACGGAATATATAGTATTCA | 115 | 2739 |
| 937894 | N/A | N/A | 82205 | 82224 | TAAGTGTCAAAGACCCTATT | 111 | 2740 |
| 937906 | N/A | N/A | 82655 | 82674 | ACAAGCCCACATATGCAATT | 55 | 2741 |
| 937918 | N/A | N/A | 82867 | 82886 | CTGTTCTTTGGTTTTTCATG | 16 | 2742 |
| 937930 | N/A | N/A | 83743 | 83762 | TTATTATCCAGTGTTTTTAA | 39 | 2743 |
| 937942 | N/A | N/A | 83794 | 83813 | CAGTGTTGCACATAGGTTAG | 14 | 2744 |
| 937954 | N/A | N/A | 84317 | 84336 | TTTCACCCCCAATATTAAGT | 33 | 2745 |
| 937966 | N/A | N/A | 84439 | 84458 | GGTCTCCTCTCCATAGGGTT | 69 | 2746 |
| 937978 | N/A | N/A | 84760 | 84779 | CAGTTTGGAATCTTATTAAG | 38 | 2747 |
| 937990 | N/A | N/A | 84818 | 84837 | TGCTGGTTCCTTACAATTAT | 23 | 2748 |
| 938002 | N/A | N/A | 85055 | 85074 | AAGGGTTAATTAGGATCTAT | 23 | 2749 |
| 938014 | N/A | N/A | 85186 | 85205 | TTGTACATTTTAACCCTTTG | 24 | 2750 |
| 938026 | N/A | N/A | 92676 | 92695 | ATTTTCCTTTCTAAGAAGCT | 109 | 2751 |
| 938038 | N/A | N/A | 97616 | 97635 | TTTTTATGTTGCTCCTTCTT | 60 | 2752 |
| 938050 | N/A | N/A | 98179 | 98198 | TGGTACACAGGAAATACGCA | 51 | 2753 |
| 938062 | N/A | N/A | 99876 | 99895 | TGCCAAGGACTTCGGAGTTT | 41 | 2754 |
| 938074 | N/A | N/A | 105836 | 105855 | GCTCTCAAAGATAGACCCTA | 47 | 2755 |
| 938086 | N/A | N/A | 110157 | 110176 | GCTCACAGCTCTGGGAGGAG | 76 | 2756 |
| 938098 | N/A | N/A | 117437 | 117456 | ATCTAGCAAACCCTCTTCTT | 84 | 2757 |
| 938110 | N/A | N/A | 119027 | 119046 | AGTTCCCATTGCATTGTTTT | 25 | 2758 |
| 938122 | N/A | N/A | 122999 | 123018 | ATCAGTTGGAATGTAAAATG | 42 | 2759 |
| 938134 | N/A | N/A | 125248 | 125267 | TAAAAATGGGAGCATGGCAA | 72 | 2760 |
| 938146 | N/A | N/A | 129750 | 129769 | AAAGCTAGTCAAGTATACTA | 78 | 2761 |
| 938158 | N/A | N/A | 130244 | 130263 | CCAGTTCCTCCAGCACGAGC | 60 | 2762 |
| 938170 | N/A | N/A | 132161 | 132180 | GCTTATTATTCTCACATATA | 8 | 2763 |
| 938182 | N/A | N/A | 132518 | 132537 | AGTTACATGTAACCATAATC | 41 | 2764 |
| 938194 | N/A | N/A | 133369 | 133388 | ATAAACCAAGTTAGTTTGTC | 35 | 2765 |
| 938206 | N/A | N/A | 134853 | 134872 | TTCTTCTGTTTGCATTAAAT | 53 | 2766 |
| 938218 | N/A | N/A | 137049 | 137068 | CATGTAT CCTTTAAAAAGTG | 72 | 2767 |
| 938230 | N/A | N/A | 139050 | 139069 | AAGCAGCAGATTAAATTAGC | 70 | 2768 |
| 938242 | N/A | N/A | 139497 | 139516 | AAAACTTTAGTCTTCATAAA | 110 | 2769 |
| 938254 | N/A | N/A | 143622 | 143641 | GGACAACATGATGGGCCAGT | 62 | 2770 |
| 938266 | N/A | N/A | 146188 | 146207 | TGCTTCCAGCTTCTAGTTAC | 55 | 2771 |
| 938278 | N/A | N/A | 147266 | 147285 | CACCAGGCAGTGAAAAGAGA | 93 | 2772 |

TABLE 38
Percent control of human ATXN2 RNA with 5-10-5 MOE gapmers
with mixed internucleoside linkages

| | SEQ ID | SEQ ID | SEQ ID | SEQ ID | | | |
|---|---|---|---|---|---|---|---|
| | NO: 1 | NO: 1 | NO: 2 | NO: 2 | | | |
| Compound | Start | Stop | Start | Stop | | ATXN2 % | SEQ |
| Number | Site | Site | Site | Site | Sequence (5′ to 3′) | control | ID NO |
| 708199 | 1477 | 1496 | 81637 | 81656 | GCTAACTGGTTTGCCCTTGC | 19 | 32 |
| 937368 | 1565 | 1584 | 81725 | 81744 | AACTGCTGTGTATTTTTCTT | 45 | 2773 |
| 937380 | 3949 | 3968 | 147864 | 147883 | ATTAGCATCATTGGCGCATG | 54 | 2774 |
| 937391 | 4405 | 4424 | 149156 | 149175 | CTAGCTGATGTGTTCATGAC | 48 | 2775 |
| 937415 | N/A | N/A | 4045 | 4064 | GAACTGACAACCGCCCGCCA | 30 | 2776 |
| 937427 | N/A | N/A | 4532 | 4551 | CTAAGTAGTGTTTGGGATGC | 21 | 2777 |
| 937439 | N/A | N/A | 4752 | 4771 | CAATGCAACTTAATAACCTT | 28 | 2778 |
| 937451 | N/A | N/A | 6471 | 6490 | CTAGCAAGAGCCATAAAAAT | 78 | 2779 |
| 937463 | N/A | N/A | 8194 | 8213 | ATCCCTTATGTAGAAGTATA | 40 | 2780 |
| 937475 | N/A | N/A | 9937 | 9956 | TCAAAGCTTAGAGTTTTTGC | 38 | 2781 |
| 937487 | N/A | N/A | 10383 | 10402 | TAAAAAGGTTGAGGACCATT | 62 | 2782 |
| 937499 | N/A | N/A | 15807 | 15826 | TGGTATACTTGTTGAGCTCT | 36 | 2783 |
| 937511 | N/A | N/A | 17161 | 17180 | CATTTTGAATTACAATGCGG | 19 | 2784 |
| 937523 | N/A | N/A | 19683 | 19702 | ACCAGAGCCATTCCAACTCC | 60 | 2785 |
| 937535 | N/A | N/A | 19992 | 20011 | GATCAGGGCCCAGGCCTATG | 75 | 2786 |
| 937547 | N/A | N/A | 23255 | 23274 | ACGCTGTATTTTTACTCACC | 8 | 2787 |
| 937559 | N/A | N/A | 26624 | 26643 | TGTATGCCCTGGGAGAATAA | 67 | 2788 |
| 937571 | N/A | N/A | 28083 | 28102 | CAAAGACTTTGAAATCTCAC | 35 | 2789 |
| 937583 | N/A | N/A | 28498 | 28517 | ATCACCGGATTGTTTTCTTC | 25 | 2790 |
| 937595 | N/A | N/A | 28893 | 28912 | CTGAAGTCTTGTTCAGTGTC | 21 | 2791 |
| 937607 | N/A | N/A | 32325 | 32344 | TTCCATACAGATCGCATAGC | 46 | 2792 |
| 937619 | N/A | N/A | 32793 | 32812 | TGTTGTTGTTTACATTATTA | 9 | 2793 |
| 937631 | N/A | N/A | 32808 | 32827 | CAATTTCAGACTTCTTGTTG | 44 | 2794 |
| 937643 | N/A | N/A | 33044 | 33063 | CCCTCCAGCTATTCACATGG | 87 | 2795 |
| 937655 | N/A | N/A | 36310 | 36329 | TCTCTTTGCGCCTGTGTCAC | 26 | 2796 |
| 937667 | N/A | N/A | 36849 | 36868 | TCAGTATTTACTACTTCTGC | 28 | 2797 |
| 937679 | N/A | N/A | 37799 | 37818 | GAAGTCTTCCTTCGATTATC | 32 | 2798 |
| 937691 | N/A | N/A | 41281 | 41300 | ATTTTATGAGGGACTAGAGC | 44 | 2799 |
| 937703 | N/A | N/A | 44743 | 44762 | TCATTTCTAAATAATATGCG | 90 | 2800 |
| 937715 | N/A | N/A | 48108 | 48127 | TTGGTTCAGACGCAACCATG | 129 | 2801 |
| 937727 | N/A | N/A | 48856 | 48875 | AGTATTTGAAACTGAGAAGT | 66 | 2802 |
| 937739 | N/A | N/A | 49154 | 49173 | TTAGCTCATCAAGGTACCAG | 15 | 2803 |
| 937751 | N/A | N/A | 50210 | 50229 | GACTAAATTTTTAATATAAC | 88 | 2804 |
| 937763 | N/A | N/A | 52397 | 52416 | AGTAAGTCTCTAATAAAAAA | 96 | 2805 |
| 937775 | N/A | N/A | 55360 | 55379 | GCAGCGGAAAATATGATTTA | 64 | 2806 |
| 937787 | N/A | N/A | 57465 | 57484 | TTCACTAGGTTCTCAAAAGG | 84 | 2807 |
| 937799 | N/A | N/A | 58355 | 58374 | CACTATCAAGACCAAAAAGA | 113 | 2808 |
| 937811 | N/A | N/A | 60508 | 60527 | TGTTTAATCACAGTTTTCTC | 51 | 2809 |
| 937823 | N/A | N/A | 62624 | 62643 | AAGATCAAAAGAAGTTTTAG | 89 | 2810 |
| 937835 | N/A | N/A | 68567 | 68586 | AAAAGCATTCTGGAAGAGAA | 98 | 2811 |
| 937847 | N/A | N/A | 69110 | 69129 | TTAACTGAGTTCTATAGGTG | 53 | 2812 |
| 937859 | N/A | N/A | 72175 | 72194 | TAGCAGGCGATGTTGGAGGA | 131 | 2813 |
| 937871 | N/A | N/A | 74117 | 74136 | TAGGTGTGGGTAGGTATGAG | 86 | 2814 |
| 937883 | N/A | N/A | 76109 | 76128 | TATGTGAAGATAAACTGCTA | 73 | 2815 |
| 937895 | N/A | N/A | 82215 | 82234 | AACTCTTCTCTAAGTGTCAA | 79 | 2816 |
| 937907 | N/A | N/A | 82806 | 82825 | GCCAGTCTCACAGTGTCAAC | 27 | 2817 |
| 937919 | N/A | N/A | 82878 | 82897 | TCTCTCACTGGCTGTTCTTT | 64 | 2818 |
| 937931 | N/A | N/A | 83773 | 83792 | ATTTTCCATATAAATTATGT | 94 | 2819 |
| 937943 | N/A | N/A | 83804 | 83823 | ATATTAACCACAGTGTTGCA | 41 | 2820 |
| 937955 | N/A | N/A | 84347 | 84366 | ACTAAAATCTTTCCTCAGTG | 70 | 2821 |
| 937967 | N/A | N/A | 84579 | 84598 | TCTAAGCGACTGCTTAATAA | 78 | 2822 |
| 937979 | N/A | N/A | 84761 | 84780 | TCAGTTTGGAATCTTATTAA | 33 | 2823 |
| 937991 | N/A | N/A | 84819 | 84838 | ATGCTGGTTCCTTACAATTA | 19 | 2824 |
| 938003 | N/A | N/A | 85057 | 85076 | CAAAGGGTTAATTAGGATCT | 33 | 2825 |
| 938015 | N/A | N/A | 85187 | 85206 | CTTGTACATTTTAACCCTTT | 22 | 2826 |
| 938027 | N/A | N/A | 95247 | 95266 | TACACTTTAAACGGTTTATT | 54 | 2827 |
| 938039 | N/A | N/A | 97617 | 97636 | CTTTTTATGTTGCTCCTTCT | 45 | 2828 |
| 938051 | N/A | N/A | 98329 | 98348 | GCCCTCTTACTTACTAGCCA | 67 | 2829 |
| 938063 | N/A | N/A | 99878 | 99897 | ATTGCCAAGGACTTCGGAGT | 55 | 2830 |
| 938075 | N/A | N/A | 105916 | 105935 | CAAATAGGCCCAATACATAT | 93 | 2831 |
| 938087 | N/A | N/A | 110707 | 110726 | AATTGTCCATCCCAGTGATT | 98 | 2832 |
| 938099 | N/A | N/A | 117523 | 117542 | GTTGCCCCTCTGCTTCAAAA | 57 | 2833 |
| 938111 | N/A | N/A | 119029 | 119048 | AAAGTTCCCATTGCATTGTT | 31 | 2834 |
| 938123 | N/A | N/A | 123079 | 123098 | GACCTGTTGAAATTAAAAAG | 91 | 2835 |
| 938135 | N/A | N/A | 125729 | 125748 | GAATTACATTATTATCTATC | 50 | 2836 |
| 938147 | N/A | N/A | 129785 | 129804 | CTTATTACCTTCCTGTATAT | 117 | 2837 |
| 938159 | N/A | N/A | 130324 | 130343 | TCTGCATGTAAGGGCCTCGC | 53 | 2838 |
| 938171 | N/A | N/A | 132163 | 132182 | TTGCTTATTATTCTCACATA | 19 | 2839 |
| 938183 | N/A | N/A | 132519 | 132538 | TAGTTACATGTAACCATAAT | 54 | 2840 |
| 938195 | N/A | N/A | 133470 | 133489 | ATAAAAGCCAGCATGATAAA | 64 | 2841 |
| 938207 | N/A | N/A | 134941 | 134960 | CTATGTTTTCAATGCCTTTG | 21 | 2842 |
| 938219 | N/A | N/A | 137245 | 137264 | AAAATATTAGGCATTTCCCA | 44 | 2843 |
| 938231 | N/A | N/A | 139266 | 139285 | ATTTGTAACTAGGTTTTGTC | 74 | 2844 |
| 938243 | N/A | N/A | 139545 | 139564 | AATTTTATTTGTAATACTGA | 121 | 2845 |
| 938255 | N/A | N/A | 143628 | 143647 | TTCAAAGGACAACATGATGG | 82 | 2846 |
| 938267 | N/A | N/A | 146379 | 146398 | CTTCAGTGCAGCTCCTTCTC | 55 | 2847 |
| 938279 | N/A | N/A | 147364 | 147383 | AAACAGATTACATTAATAAG | 86 | 2848 |

TABLE 39
Percent control of human ATXN2 RNA with 5-10-5 MOE gapmers
with mixed internucleoside linkages

| | SEQ ID | SEQ ID | SEQ ID | SEQ ID | | | |
|---|---|---|---|---|---|---|---|
| | NO: 1 | NO: 1 | NO: 2 | NO: 2 | | | |
| Compound | Start | Stop | Start | Stop | | ATXN2 % | SEQ |
| Number | Site | Site | Site | Site | Sequence (5′ to 3′) | control | ID NO |
| 708199 | 1477 | 1496 | 81637 | 81656 | GCTAACTGGTTTGCCCTTGC | 17 | 32 |
| 937369 | 1566 | 1585 | 81726 | 81745 | GAACTGCTGTGTATTTTTCT | 28 | 2849 |
| 937381 | 3952 | 3971 | 147867 | 147886 | GTCATTAGCATCATTGGCGC | 87 | 2850 |
| 937392 | 4406 | 4425 | 149157 | 149176 | GCTAGCTGATGTGTTCATGA | 60 | 2851 |
| 937416 | N/A | N/A | 4090 | 4109 | CCTTCTCCCTTTGAACACTA | 37 | 2852 |
| 937428 | N/A | N/A | 4533 | 4552 | GCTAAGTAGTGTTTGGGATG | 14 | 2853 |
| 937440 | N/A | N/A | 4753 | 4772 | TCAATGCAACTTAATAACCT | 55 | 2854 |
| 937452 | N/A | N/A | 6571 | 6590 | CCCACAATATTTGACAAACT | 70 | 2855 |
| 937464 | N/A | N/A | 8607 | 8626 | GCTGTAGCTATTTAGGACAA | 24 | 2856 |
| 937476 | N/A | N/A | 10130 | 10149 | ATGTTAGCCAGCTGGTGTAC | 97 | 2857 |
| 937488 | N/A | N/A | 10400 | 10419 | AAACCGGTCCCTAGTGTTAA | 91 | 2858 |
| 937500 | N/A | N/A | 16473 | 16492 | AGTAATGCCCTTAGGGCCTA | 76 | 2859 |
| 937512 | N/A | N/A | 17162 | 17181 | ACATTTTGAATTACAATGCG | 19 | 2860 |
| 937524 | N/A | N/A | 19836 | 19855 | CCCGTGATCTGATTCCCATG | 71 | 2861 |
| 937536 | N/A | N/A | 20207 | 20226 | ATGCTCAAGGAGGAGCAAGA | 104 | 2862 |
| 937548 | N/A | N/A | 23256 | 23275 | TACGCTGTATTTTTACTCAC | 36 | 2863 |
| 937560 | N/A | N/A | 26628 | 26647 | ATTATGTATGCCCTGGGAGA | 58 | 2864 |
| 937572 | N/A | N/A | 28084 | 28103 | GCAAAGACTTTGAAATCTCA | 11 | 2865 |
| 937584 | N/A | N/A | 28499 | 28518 | AATCACCGGATTGTTTTCTT | 28 | 2866 |
| 937596 | N/A | N/A | 28894 | 28913 | GCTGAAGTCTTGTTCAGTGT | 66 | 2867 |
| 937608 | N/A | N/A | 32326 | 32345 | ATTCCATACAGATCGCATAG | 37 | 2868 |
| 937620 | N/A | N/A | 32796 | 32815 | TCTTGTTGTTGTTTACATTA | 11 | 2869 |
| 937632 | N/A | N/A | 32809 | 32828 | CCAATTTCAGACTTCTTGTT | 28 | 2870 |
| 937644 | N/A | N/A | 33050 | 33069 | GCTCTTCCCTCCAGCTATTC | 44 | 2871 |
| 937656 | N/A | N/A | 36311 | 36330 | CTCTCTTTGCGCCTGTGTCA | 24 | 2872 |
| 937668 | N/A | N/A | 36851 | 36870 | AATCAGTATTTACTACTTCT | 25 | 2873 |
| 937680 | N/A | N/A | 38003 | 38022 | TACAGGTGAGATATATAGGA | 9 | 2874 |
| 937692 | N/A | N/A | 41282 | 41301 | CATTTTATGAGGGACTAGAG | 63 | 2875 |
| 937704 | N/A | N/A | 45245 | 45264 | ACCAATCACTGTTATAAAGA | 42 | 2876 |
| 937716 | N/A | N/A | 48164 | 48183 | AAATTGTCATACTGTATTGT | 60 | 2877 |
| 937728 | N/A | N/A | 48887 | 48906 | CTGATTACACAAACCAGTCT | 73 | 2878 |
| 937740 | N/A | N/A | 49155 | 49174 | TTTAGCTCATCAAGGTACCA | 64 | 2879 |
| 937752 | N/A | N/A | 50666 | 50685 | TGGCATATACAAATAAATAA | 57 | 2880 |
| 937764 | N/A | N/A | 52516 | 52535 | TTAAACCAGGATCCCTAGAA | 93 | 2881 |
| 937776 | N/A | N/A | 55427 | 55446 | CACATTCTGTTACTTCACCA | 57 | 2882 |
| 937788 | N/A | N/A | 57466 | 57485 | TTTCACTAGGTTCTCAAAAG | 93 | 2883 |
| 937800 | N/A | N/A | 58468 | 58487 | ACACATATCTGTGTCTTAAT | 67 | 2884 |
| 937812 | N/A | N/A | 60509 | 60528 | TTGTTTAATCACAGTTTTCT | 49 | 2885 |
| 937824 | N/A | N/A | 63522 | 63541 | CTCCCTATCTCAAATGAATG | 105 | 2886 |
| 937836 | N/A | N/A | 68773 | 68792 | TGCTGAACTCTTCTGAGGCT | 98 | 2887 |
| 937848 | N/A | N/A | 69111 | 69130 | ATTAACTGAGTTCTATAGGT | 51 | 2888 |
| 937860 | N/A | N/A | 72338 | 72357 | AAAAGCATTGTAACAACAAG | 77 | 2889 |
| 937872 | N/A | N/A | 74138 | 74157 | TAACCTCTTCTTATCCCAAA | 97 | 2890 |
| 937884 | N/A | N/A | 76189 | 76208 | GAAACATTTATTGAACATAA | 78 | 2891 |
| 937896 | N/A | N/A | 82245 | 82264 | GCTTTTCATCAGGTGATAAA | 70 | 2892 |
| 937908 | N/A | N/A | 82847 | 82866 | GCTCCAATATCGGCAATGCT | 59 | 2893 |
| 937920 | N/A | N/A | 82922 | 82941 | TTTTTGTCCTTCACTTTCTC | 53 | 2894 |
| 937932 | N/A | N/A | 83774 | 83793 | AATTTTCCATATAAATTATG | 145 | 2895 |
| 937944 | N/A | N/A | 83853 | 83872 | CCTTTCTTGAAGTAAGCATA | 29 | 2896 |
| 937956 | N/A | N/A | 84392 | 84411 | CAGCCCCCTTCAGGTTTTTT | 59 | 2897 |
| 937968 | N/A | N/A | 84609 | 84628 | TTCTAAATAATTTATACAGT | 81 | 2898 |
| 937980 | N/A | N/A | 84762 | 84781 | CTCAGTTTGGAATCTTATTA | 35 | 2899 |
| 937992 | N/A | N/A | 84820 | 84839 | AATGCTGGTTCCTTACAATT | 31 | 2900 |
| 938004 | N/A | N/A | 85059 | 85078 | CCCAAAGGGTTAATTAGGAT | 7 | 2901 |
| 938016 | N/A | N/A | 85188 | 85207 | TCTTGTACATTTTAACCCTT | 29 | 2902 |
| 938028 | N/A | N/A | 95368 | 95387 | TTAAAATCAACTGAGAAGAC | 95 | 2903 |
| 938040 | N/A | N/A | 97618 | 97637 | ACTTTTTATGTTGCTCCTTC | 28 | 2904 |
| 938052 | N/A | N/A | 98348 | 98367 | CTTAAACACCAGATGGTCAG | 74 | 2905 |
| 938064 | N/A | N/A | 100037 | 100056 | ATAGCTAAAGAGTCAAGTGG | 65 | 2906 |
| 938076 | N/A | N/A | 106796 | 106815 | AGAGGAAGTAAAAAAGAAGG | 91 | 2907 |
| 938088 | N/A | N/A | 110913 | 110932 | AACTGCCCCTCCAACACCCC | 84 | 2908 |
| 938100 | N/A | N/A | 117931 | 117950 | AGCACAGAATACTAGTTTAT | 55 | 2909 |
| 938112 | N/A | N/A | 119030 | 119049 | AAAAGTTCCCATTGCATTGT | 45 | 2910 |
| 938124 | N/A | N/A | 123159 | 123178 | TGATGAGGTGCTCCTGGATC | 60 | 2911 |
| 938136 | N/A | N/A | 125751 | 125770 | ATCAGTTTGTATGACCATAA | 9 | 2912 |
| 938148 | N/A | N/A | 129786 | 129805 | ACTTATTACCTTCCTGTATA | 69 | 2913 |
| 938160 | N/A | N/A | 130548 | 130567 | GGCACTGCATTCATTTTGAG | 64 | 2914 |
| 938172 | N/A | N/A | 132164 | 132183 | TTTGCTTATTATTCTCACAT | 12 | 2915 |
| 938184 | N/A | N/A | 132520 | 132539 | GTAGTTACATGTAACCATAA | 27 | 2916 |
| 938196 | N/A | N/A | 133494 | 133513 | ATTGTTAAAATATATACAAG | 100 | 2917 |
| 938208 | N/A | N/A | 134957 | 134976 | GCAGTCATTAGTGGTCCTAT | 21 | 2918 |
| 938220 | N/A | N/A | 137464 | 137483 | ATAAATTTCATCTTATCAGA | 97 | 2919 |
| 938232 | N/A | N/A | 139267 | 139286 | AATTTGTAACTAGGTTTTGT | 79 | 2920 |
| 938244 | N/A | N/A | 140114 | 140133 | TATACTTTAAATCAATACTA | 81 | 2921 |
| 938256 | N/A | N/A | 143759 | 143778 | CTTCTGCCACTCAGTTTACT | 87 | 2922 |
| 938268 | N/A | N/A | 146518 | 146537 | GGAAATGGAATTCATTGTGG | 33 | 2923 |
| 938280 | N/A | N/A | 147490 | 147509 | ATTAGACACTGGATCCAAGG | 53 | 2924 |

TABLE 40
Percent control of human ATXN2 RNA with 5-10-5 MOE gapmers
with mixed internucleoside linkages

| | SEQ ID | SEQ ID | SEQ ID | SEQ ID | | | |
|---|---|---|---|---|---|---|---|
| | NO: 1 | NO: 1 | NO: 2 | NO: 2 | | | |
| Compound | Start | Stop | Start | Stop | | ATXN2 % | SEQ |
| Number | Site | Site | Site | Site | Sequence (5′ to 3′) | control | ID NO |
| 708199 | 1477 | 1496 | 81637 | 81656 | GCTAACTGGTTTGCCCTTGC | 20 | 32 |
| 937370 | 2356 | 2375 | 91240 | 91259 | CTGTTCGATGCAGGACTAGC | 49 | 2925 |
| 937382 | 4393 | 4412 | 149144 | 149163 | TTCATGACTTTCAAGGGTTA | 27 | 2926 |
| 937393 | 4413 | 4432 | 149164 | 149183 | TTCTTTTGCTAGCTGATGTG | 31 | 2927 |
| 937417 | N/A | N/A | 4091 | 4110 | TCCTTCTCCCTTTGAACACT | 23 | 2928 |
| 937429 | N/A | N/A | 4534 | 4553 | GGCTAAGTAGTGTTTGGGAT | 4 | 2929 |
| 937441 | N/A | N/A | 4754 | 4773 | GTCAATGCAACTTAATAACC | 18 | 2930 |
| 937453 | N/A | N/A | 6585 | 6604 | TCCTTTAAAAATTCCCCACA | 73 | 2931 |
| 937465 | N/A | N/A | 8764 | 8783 | AATAGGGTTTTGTTCATGCT | 4 | 2932 |
| 937477 | N/A | N/A | 10345 | 10364 | TGATCTTGTGTATATATTAC | 11 | 2933 |
| 937489 | N/A | N/A | 11272 | 11291 | GACTGTATTCCATAAAACAA | 48 | 2934 |
| 937501 | N/A | N/A | 16482 | 16501 | CTATAAAACAGTAATGCCCT | 91 | 2935 |
| 937513 | N/A | N/A | 17163 | 17182 | TACATTTTGAATTACAATGC | 25 | 2936 |
| 937525 | N/A | N/A | 19925 | 19944 | ATTACGACCATTCTGCTCAG | 39 | 2937 |
| 937537 | N/A | N/A | 20254 | 20273 | CAAACCTCTTCACTCCTGCC | 66 | 2938 |
| 937549 | N/A | N/A | 23257 | 23276 | TTACGCTGTATTTTTACTCA | 23 | 2939 |
| 937561 | N/A | N/A | 26913 | 26932 | TTTCTTTTCCGTTTTTCATA | 21 | 2940 |
| 937573 | N/A | N/A | 28085 | 28104 | AGCAAAGACTTTGAAATCTC | 19 | 2941 |
| 937585 | N/A | N/A | 28587 | 28606 | TATAAACAAACTTTTTGATT | 104 | 2942 |
| 937597 | N/A | N/A | 28948 | 28967 | GGAATTATTCTCTCAACTAT | 89 | 2943 |
| 937609 | N/A | N/A | 32327 | 32346 | TATTCCATACAGATCGCATA | 52 | 2944 |
| 937621 | N/A | N/A | 32797 | 32816 | TTCTTGTTGTTGTTTACATT | 12 | 2945 |
| 937633 | N/A | N/A | 32810 | 32829 | TCCAATTTCAGACTTCTTGT | 10 | 2946 |
| 937645 | N/A | N/A | 33766 | 33785 | AATATACACAAACAATCTAA | 90 | 2947 |
| 937657 | N/A | N/A | 36312 | 36331 | GCTCTCTTTGCGCCTGTGTC | 20 | 2948 |
| 937669 | N/A | N/A | 36852 | 36871 | GAATCAGTATTTACTACTTC | 21 | 2949 |
| 937681 | N/A | N/A | 38517 | 38536 | GTCTACAAAATAACCTGTAA | 54 | 2950 |
| 937693 | N/A | N/A | 41719 | 41738 | AATGATGCTTTCAAAGGCAC | 90 | 2951 |
| 937705 | N/A | N/A | 45419 | 45438 | TTATAGCCAGGCATGTGGCA | 73 | 2952 |
| 937717 | N/A | N/A | 48165 | 48184 | TAAATTGTCATACTGTATTG | 55 | 2953 |
| 937729 | N/A | N/A | 49018 | 49037 | CTATGGTTTGTCTTAAGTAC | 46 | 2954 |
| 937741 | N/A | N/A | 49156 | 49175 | CTTTAGCTCATCAAGGTACC | 67 | 2955 |
| 937753 | N/A | N/A | 50759 | 50778 | ATAAAAACAGCTTTTGGTAT | 75 | 2956 |
| 937765 | N/A | N/A | 52610 | 52629 | AAGGCCACAGAACAGAGCCA | 110 | 2957 |
| 937777 | N/A | N/A | 55507 | 55526 | TGGTCATGAATAAGAATCGC | 77 | 2958 |
| 937789 | N/A | N/A | 57467 | 57486 | GTTTCACTAGGTTCTCAAAA | 32 | 2959 |
| 937801 | N/A | N/A | 58477 | 58496 | CCAGAATGAACACATATCTG | 95 | 2960 |
| 937813 | N/A | N/A | 60510 | 60529 | TTTGTTTAATCACAGTTTTC | 60 | 2961 |
| 937825 | N/A | N/A | 63655 | 63674 | AGGAGGCTAAGGTGAATCAC | 66 | 2962 |
| 937837 | N/A | N/A | 68850 | 68869 | AAATAGGTGAGGGACTGGAA | 80 | 2963 |
| 937849 | N/A | N/A | 69112 | 69131 | AATTAACTGAGTTCTATAGG | 85 | 2964 |
| 937861 | N/A | N/A | 72541 | 72560 | ACTATGCCCAGCAAGTCTGG | 118 | 2965 |
| 937873 | N/A | N/A | 74238 | 74257 | CTTCTATAACTGTCATTGTC | 66 | 2966 |
| 937885 | N/A | N/A | 76310 | 76329 | GAAAGTTTATATAATCTGGC | 96 | 2967 |
| 937897 | N/A | N/A | 82325 | 82344 | AGATCCTGTGTTCCAGACAC | 39 | 2968 |
| 937909 | N/A | N/A | 82848 | 82867 | GGCTCCAATATCGGCAATGC | 34 | 2969 |
| 937921 | N/A | N/A | 82952 | 82971 | TCCATCAATCTTGGTCTATC | 26 | 2970 |
| 937933 | N/A | N/A | 83784 | 83803 | CATAGGTTAGAATTTTCCAT | 14 | 2971 |
| 937945 | N/A | N/A | 83883 | 83902 | TCATGTCTTGTATTATAAGT | 57 | 2972 |
| 937957 | N/A | N/A | 84402 | 84421 | ATATATTTCTCAGCCCCCTT | 61 | 2973 |
| 937969 | N/A | N/A | 84673 | 84692 | GATAATATTCATTGCTATTT | 23 | 2974 |
| 937981 | N/A | N/A | 84763 | 84782 | ACTCAGTTTGGAATCTTATT | 34 | 2975 |
| 937993 | N/A | N/A | 84821 | 84840 | AAATGCTGGTTCCTTACAAT | 50 | 2976 |
| 938005 | N/A | N/A | 85101 | 85120 | TTAACCTCCTTAAGATTAAG | 89 | 2977 |
| 938017 | N/A | N/A | 85189 | 85208 | TTCTTGTACATTTTAACCCT | 27 | 2978 |
| 938029 | N/A | N/A | 95475 | 95494 | TAACGGTTGCTTAGGGTTGG | 36 | 2979 |
| 938041 | N/A | N/A | 97619 | 97638 | GACTTTTTATGTTGCTCCTT | 15 | 2980 |
| 938053 | N/A | N/A | 98485 | 98504 | AAATGAAGGACTACAGATAT | 89 | 2981 |
| 938065 | N/A | N/A | 100065 | 100084 | GCATCGCAAGCTTTACTGCA | 74 | 2982 |
| 938077 | N/A | N/A | 106803 | 106822 | GGAGCGAAGAGGAAGTAAAA | 138 | 2983 |
| 938089 | N/A | N/A | 111200 | 111219 | GTCATTAAGTAGGTGAATTC | 70 | 2984 |
| 938101 | N/A | N/A | 118324 | 118343 | TGAGAAATGTCTTTTCTGTA | 36 | 2985 |
| 938113 | N/A | N/A | 119031 | 119050 | AAAAAGTTCCCATTGCATTG | 46 | 2986 |
| 938125 | N/A | N/A | 123631 | 123650 | AAACTGTTGGCTCAAATGAT | 79 | 2987 |
| 938137 | N/A | N/A | 125847 | 125866 | AAGGTAGTCCTATTAGATTA | 53 | 2988 |
| 938149 | N/A | N/A | 129787 | 129806 | TACTTATTACCTTCCTGTAT | 72 | 2989 |
| 938161 | N/A | N/A | 130731 | 130750 | CTCAGCCTCAAACACCAGTT | 66 | 2990 |
| 938173 | N/A | N/A | 132165 | 132184 | TTTTGCTTATTATTCTCACA | 11 | 2991 |
| 938185 | N/A | N/A | 132521 | 132540 | TGTAGTTACATGTAACCATA | 25 | 2992 |
| 938197 | N/A | N/A | 133701 | 133720 | GTCTCAAAAGCATGCATACA | 36 | 2993 |
| 938209 | N/A | N/A | 135061 | 135080 | GAATAAAATAATTATCCTAT | 110 | 2994 |
| 938221 | N/A | N/A | 137468 | 137487 | AGGCATAAATTTCATCTTAT | 8 | 2995 |
| 938233 | N/A | N/A | 139268 | 139287 | TAATTTGTAACTAGGTTTTG | 89 | 2996 |
| 938245 | N/A | N/A | 140734 | 140753 | GCTGAGTGAATGTACATAGG | 21 | 2997 |
| 938257 | N/A | N/A | 143795 | 143814 | AAGGACCACAGTCTCTCTCA | 73 | 2998 |
| 938269 | N/A | N/A | 146633 | 146652 | AACTTCCCAGAGCTGTGGAA | 79 | 2999 |
| 938281 | N/A | N/A | 147720 | 147739 | GGACTCTCAGGAAAGGGCAA | 62 | 3000 |

TABLE 41
Percent control of human ATXN2 RNA with 5-10-5 MOE gapmers
with mixed internucleoside linkages

| | SEQ ID | SEQ ID | SEQ ID | SEQ ID | | | |
|---|---|---|---|---|---|---|---|
| | NO: 1 | NO: 1 | NO: 2 | NO: 2 | | | |
| Compound | Start | Stop | Start | Stop | | ATXN2 % | SEQ |
| Number | Site | Site | Site | Site | Sequence (5′ to 3′) | control | ID NO |
| 708199 | 1477 | 1496 | 81637 | 81656 | GCTAACTGGTTTGCCCTTGC | 22 | 32 |
| 937364 | 1078 | 1097 | 49252 | 49271 | CTTTTCTCATGTGCGGCATC | 26 | 3001 |
| 937374 | 2459 | 2478 | 91729 | 91748 | TGATGTTTCATTGGGTTTAA | 13 | 3002 |
| 937386 | 4398 | 4417 | 149149 | 149168 | ATGTGTTCATGACTTTCAAG | 18 | 3003 |
| 937397 | 4418 | 4437 | 149169 | 149188 | GTTACTTCTTTTGCTAGCTG | 16 | 3004 |
| 937409 | N/A | N/A | 3346 | 3365 | CTAACTTCTCCCCTCCAGAG | 69 | 3005 |
| 937421 | N/A | N/A | 4525 | 4544 | GTGTTTGGGATGCTTCAGAC | 8 | 3006 |
| 937433 | N/A | N/A | 4745 | 4764 | ACTTAATAACCTTAGTTTTA | 83 | 3007 |
| 937445 | N/A | N/A | 5173 | 5192 | GAATGCTGCATTTTTTTTCA | 42 | 3008 |
| 937457 | N/A | N/A | 7141 | 7160 | TAAGTTGCAATGCCTCAAGA | 44 | 3009 |
| 937469 | N/A | N/A | 9929 | 9948 | TAGAGTTTTTGCCTTCCATT | 5 | 3010 |
| 937481 | N/A | N/A | 10349 | 10368 | AGCATGATCTTGTGTATATA | 5 | 3011 |
| 937493 | N/A | N/A | 13758 | 13777 | GGCACGAAACTGACATTTTC | 20 | 3012 |
| 937505 | N/A | N/A | 17154 | 17173 | AATTACAATGCGGTATATAT | 29 | 3013 |
| 937517 | N/A | N/A | 18681 | 18700 | CAGTATCTCAGTTTTTTTTT | 22 | 3014 |
| 937529 | N/A | N/A | 19931 | 19950 | CGCATCATTACGACCATTCT | 26 | 3015 |
| 937541 | N/A | N/A | 22994 | 23013 | AACATAGTTTCTCATCACCA | 26 | 3016 |
| 937553 | N/A | N/A | 24547 | 24566 | CTGGCCACGACAAGTTAATT | 88 | 3017 |
| 937565 | N/A | N/A | 28032 | 28051 | ATCTCTTTGACCTAAAGGCA | 49 | 3018 |
| 937577 | N/A | N/A | 28491 | 28510 | GATTGTTTTCTTCATTATTG | 23 | 3019 |
| 937589 | N/A | N/A | 28886 | 28905 | CTTGTTCAGTGTCCTTCTAG | 25 | 3020 |
| 937601 | N/A | N/A | 30392 | 30411 | GGGATTAGGATGCCAAATAG | 18 | 3021 |
| 937613 | N/A | N/A | 32332 | 32351 | AGTAATATTCCATACAGATC | 32 | 3022 |
| 937625 | N/A | N/A | 32801 | 32820 | AGACTTCTTGTTGTTGTTTA | 28 | 3023 |
| 937637 | N/A | N/A | 32814 | 32833 | TTCTTCCAATTTCAGACTTC | 34 | 3024 |
| 937649 | N/A | N/A | 34713 | 34732 | ACCAGGAAATTGCTTCTAAT | 55 | 3025 |
| 937661 | N/A | N/A | 36317 | 36336 | CATGTGCTCTCTTTGCGCCT | 60 | 3026 |
| 937673 | N/A | N/A | 37129 | 37148 | ATATGGCCCTAGAGCCTAAA | 105 | 3027 |
| 937685 | N/A | N/A | 41273 | 41292 | AGGGACTAGAGCATCCATAA | 41 | 3028 |
| 937697 | N/A | N/A | 43295 | 43314 | AACAAAGGCCAAGAGCATAT | 49 | 3029 |
| 937709 | N/A | N/A | 47548 | 47567 | ATGGAATTACTTTATTCTAC | 64 | 3030 |
| 937721 | N/A | N/A | 48532 | 48551 | CAAAACATTAACAATACACT | 89 | 3031 |
| 937733 | N/A | N/A | 49147 | 49166 | ATCAAGGTACCAGTTCTTAT | 21 | 3032 |
| 937745 | N/A | N/A | 49228 | 49247 | ACCAAATCACACTAAAATGA | 99 | 3033 |
| 937757 | N/A | N/A | 51198 | 51217 | AGTAGGGAACCTTTTTTTTT | 45 | 3034 |
| 937769 | N/A | N/A | 53410 | 53429 | ACAACAAACCAAACCACATA | 82 | 3035 |
| 937781 | N/A | N/A | 56404 | 56423 | CTAGAAAGGCAGATGTTGAA | 98 | 3036 |
| 937793 | N/A | N/A | 57473 | 57492 | TACACAGTTTCACTAGGTTC | 33 | 3037 |
| 937805 | N/A | N/A | 58745 | 58764 | TGAAGTTATTGTTCTGACTT | 42 | 3038 |
| 937817 | N/A | N/A | 61186 | 61205 | TTTCTCACATTTACCATTCA | 84 | 3039 |
| 937829 | N/A | N/A | 66835 | 66854 | AAAAAACTGACCTATTCTAT | 87 | 3040 |
| 937841 | N/A | N/A | 69103 | 69122 | AGTTCTATAGGTGCTTAAGT | 32 | 3041 |
| 937853 | N/A | N/A | 70105 | 70124 | GAATACTCATCTGTTCTAAC | 74 | 3042 |
| 937865 | N/A | N/A | 73527 | 73546 | TGAAAAGCACACATTTAAGT | 78 | 3043 |
| 937877 | N/A | N/A | 74702 | 74721 | GTCTCAGAAAGTTCAGGTAG | 76 | 3044 |
| 937889 | N/A | N/A | 81890 | 81909 | TCTACTTGCATTCTCTACCT | 70 | 3045 |
| 937901 | N/A | N/A | 82428 | 82447 | TATTCACCCCATCTCCTTCC | 78 | 3046 |
| 937913 | N/A | N/A | 82853 | 82872 | TTCATGGCTCCAATATCGGC | 36 | 3047 |
| 937925 | N/A | N/A | 83229 | 83248 | TTATTTTCCCTGAAAATGAG | 109 | 3048 |
| 937937 | N/A | N/A | 83788 | 83807 | TGCACATAGGTTAGAATTTT | 14 | 3049 |
| 937949 | N/A | N/A | 84132 | 84151 | TATTGCTATTACTATTTCCA | 49 | 3050 |
| 937961 | N/A | N/A | 84406 | 84425 | TATCATATATTTCTCAGCCC | 31 | 3051 |
| 937973 | N/A | N/A | 84754 | 84773 | GGAATCTTATTAAGCAAGTC | 4 | 3052 |
| 937985 | N/A | N/A | 84811 | 84830 | TCCTTACAATTATCTATGAT | 57 | 3053 |
| 937997 | N/A | N/A | 85049 | 85068 | TAATTAGGATCTATACACAC | 70 | 3054 |
| 938009 | N/A | N/A | 85180 | 85199 | ATTTTAACCCTTTGAGGACA | 88 | 3055 |
| 938021 | N/A | N/A | 92134 | 92153 | TAAAACTCAAATTCATCAGT | 95 | 3056 |
| 938033 | N/A | N/A | 96191 | 96210 | GGACTTGTACACACAATATA | 74 | 3057 |
| 938045 | N/A | N/A | 97624 | 97643 | GATAAGACTTTTTATGTTGC | 13 | 3058 |
| 938057 | N/A | N/A | 98776 | 98795 | TAAACACTTTATAGGCAATA | 69 | 3059 |
| 938069 | N/A | N/A | 102537 | 102556 | TTAAACTCCCAGGGACATTA | 85 | 3060 |
| 938081 | N/A | N/A | 108797 | 108816 | ATTCCCAAGTGATAAGAGAT | 94 | 3061 |
| 938093 | N/A | N/A | 112501 | 112520 | CTATAGAAAAAGCAACCTAT | 115 | 3062 |
| 938105 | N/A | N/A | 118988 | 119007 | CTACACCTGCTGGTGATACA | 79 | 3063 |
| 938117 | N/A | N/A | 120010 | 120029 | AATCTAAGGCCACATGAAAA | 86 | 3064 |
| 938129 | N/A | N/A | 124704 | 124723 | AGTAACAGCAATAAAGAGAG | 78 | 3065 |
| 938141 | N/A | N/A | 127842 | 127861 | ACTATCAGTTTACAAAGATT | 75 | 3066 |
| 938153 | N/A | N/A | 129792 | 129811 | TTTGTTACTTATTACCTTCC | 57 | 3067 |
| 938165 | N/A | N/A | 131803 | 131822 | TCCACAAAGATGCTTTGCCA | 93 | 3068 |
| 938177 | N/A | N/A | 132217 | 132236 | TAAGTTGATCTACACAAATT | 88 | 3069 |
| 938189 | N/A | N/A | 132526 | 132545 | GCCCATGTAGTTACATGTAA | 46 | 3070 |
| 938201 | N/A | N/A | 134052 | 134071 | GTAGTTCAGATTTGGCTGAG | 22 | 3071 |
| 938213 | N/A | N/A | 136574 | 136593 | AAAAACATTACTAATGGAAA | 100 | 3072 |
| 938225 | N/A | N/A | 138397 | 138416 | TAGTACTCCTTCCTATTTAA | 49 | 3073 |
| 938237 | N/A | N/A | 139273 | 139292 | GTGTTTAATTTGTAACTAGG | 9 | 3074 |
| 938249 | N/A | N/A | 142569 | 142588 | ATACACTGGGAAAATTTTCC | 56 | 3075 |
| 938261 | N/A | N/A | 145704 | 145723 | CTAGCTGGGAGAGCCTCTAG | 81 | 3076 |
| 938273 | N/A | N/A | 146798 | 146817 | AGCCTCTGGTAGACACCTAC | 52 | 3077 |

TABLE 42
Percent control of human ATXN2 RNA with 5-10-5 MOE gapmers
with mixed internucleoside linkages

| | SEQ ID | SEQ ID | SEQ ID | SEQ ID | | | |
|---|---|---|---|---|---|---|---|
| | NO: 1 | NO: 1 | NO: 2 | NO: 2 | | | |
| Compound | Start | Stop | Start | Stop | | ATXN2 % | SEQ |
| Number | Site | Site | Site | Site | Sequence (5′ to 3′) | control | ID NO |
| 708199 | 1477 | 1496 | 81637 | 81656 | GCTAACTGGTTTGCCCTTGC | 10 | 32 |
| 708202 | 1481 | 1500 | 81641 | 81660 | TTCTGCTAACTGGTTTGCCC | 36 | 3078 |
| 937376 | 3484 | 3503 | 136957 | 136976 | TTGTTGTATGGTAATTTGGG | 16 | 3079 |
| 937388 | 4400 | 4419 | 149151 | 149170 | TGATGTGTTCATGACTTTCA | 17 | 3080 |
| 937399 | 4420 | 4439 | 149171 | 149190 | TTGTTACTTCTTTTGCTAGC | 83 | 3081 |
| 937411 | N/A | N/A | 3769 | 3788 | ATCTCCAGGGTCCAGCCTGG | 85 | 3082 |
| 937423 | N/A | N/A | 4527 | 4546 | TAGTGTTTGGGATGCTTCAG | 8 | 3083 |
| 937435 | N/A | N/A | 4747 | 4766 | CAACTTAATAACCTTAGTTT | 62 | 3084 |
| 937447 | N/A | N/A | 5308 | 5327 | AATAAATCACTTCTGAAAGT | 95 | 3085 |
| 937459 | N/A | N/A | 7503 | 7522 | GTAAACTCCAAAAGGACAAT | 39 | 3086 |
| 937471 | N/A | N/A | 9931 | 9950 | CTTAGAGTTTTTGCCTTCCA | 2 | 3087 |
| 937483 | N/A | N/A | 10352 | 10371 | CACAGCATGATCTTGTGTAT | 102 | 3088 |
| 937495 | N/A | N/A | 13900 | 13919 | AGTTCTGATACAGTTAATAA | 40 | 3089 |
| 937507 | N/A | N/A | 17156 | 17175 | TGAATTACAATGCGGTATAT | 16 | 3090 |
| 937519 | N/A | N/A | 18683 | 18702 | GCCAGTATCTCAGTTTTTTT | 30 | 3091 |
| 937531 | N/A | N/A | 19933 | 19952 | TGCGCATCATTACGACCATT | 64 | 3092 |
| 937543 | N/A | N/A | 23250 | 23269 | GTATTTTTACTCACCTTTTC | 43 | 3093 |
| 937555 | N/A | N/A | 25504 | 25523 | AAACCAAACCAATAGTCTGG | 59 | 3094 |
| 937567 | N/A | N/A | 28078 | 28097 | ACTTTGAAATCTCACAAGGT | 73 | 3095 |
| 937579 | N/A | N/A | 28493 | 28512 | CGGATTGTTTTCTTCATTAT | 6 | 3096 |
| 937591 | N/A | N/A | 28888 | 28907 | GTCTTGTTCAGTGTCCTTCT | 4 | 3097 |
| 937603 | N/A | N/A | 30585 | 30604 | AATCCTCTTCCATCCCCTTT | 34 | 3098 |
| 937615 | N/A | N/A | 32334 | 32353 | TAAGTAATATTCCATACAGA | 52 | 3099 |
| 937627 | N/A | N/A | 32804 | 32823 | TTCAGACTTCTTGTTGTTGT | 16 | 3100 |
| 937639 | N/A | N/A | 32816 | 32835 | TGTTCTTCCAATTTCAGACT | 8 | 3101 |
| 937651 | N/A | N/A | 36032 | 36051 | GTTATGACTACTCCACGAAC | 36 | 3102 |
| 937663 | N/A | N/A | 36845 | 36864 | TATTTACTACTTCTGCATGG | 31 | 3103 |
| 937675 | N/A | N/A | 37484 | 37503 | ACTTGGTCAGGAACTCTTGG | 53 | 3104 |
| 937687 | N/A | N/A | 41275 | 41294 | TGAGGGACTAGAGCATCCAT | 46 | 3105 |
| 937699 | N/A | N/A | 43449 | 43468 | CATATCGAAGCAGTATTCTC | 35 | 3106 |
| 937711 | N/A | N/A | 47653 | 47672 | ATTAGACTGGATAAAAGGAG | 46 | 3107 |
| 937723 | N/A | N/A | 48598 | 48617 | ACTTTTTATACCTCATCAGG | 42 | 3108 |
| 937735 | N/A | N/A | 49149 | 49168 | TCATCAAGGTACCAGTTCTT | 31 | 3109 |
| 937747 | N/A | N/A | 49954 | 49973 | ATCAGTAGCATTCTTGACCA | 37 | 3110 |
| 937759 | N/A | N/A | 51425 | 51444 | GTATTTTCTTGCCTTTCTAT | 18 | 3111 |
| 937771 | N/A | N/A | 54713 | 54732 | GTTTCTCAGTAAATCAAACT | 78 | 3112 |
| 937783 | N/A | N/A | 56926 | 56945 | ATACAGAAGAGGAAATTCTG | 112 | 3113 |
| 937795 | N/A | N/A | 57475 | 57494 | GGTACACAGTTTCACTAGGT | 4 | 3114 |
| 937807 | N/A | N/A | 59465 | 59484 | TCTCCTTCAGCTGTGTCTTC | 34 | 3115 |
| 937819 | N/A | N/A | 61340 | 61359 | CAGTCTTACTGAAAATGTCC | 83 | 3116 |
| 937831 | N/A | N/A | 67200 | 67219 | ATATATATGTTGAACACCTG | 70 | 3117 |
| 937843 | N/A | N/A | 69105 | 69124 | TGAGTTCTATAGGTGCTTAA | 54 | 3118 |
| 937855 | N/A | N/A | 71732 | 71751 | TAACATCACAAACCCTCAAA | 73 | 3119 |
| 937867 | N/A | N/A | 73814 | 73833 | TTTGATACTAACCTGAATCA | 102 | 3120 |
| 937879 | N/A | N/A | 74908 | 74927 | AGATATACCTTCGGAGTACT | 50 | 3121 |
| 937891 | N/A | N/A | 82029 | 82048 | AGATAACTATTTTAACAAGC | 50 | 3122 |
| 937903 | N/A | N/A | 82476 | 82495 | GCACTAACTGTTCTCTGTGT | 51 | 3123 |
| 937915 | N/A | N/A | 82855 | 82874 | TTTTCATGGCTCCAATATCG | 33 | 3124 |
| 937927 | N/A | N/A | 83445 | 83464 | AAACTATTTTATCAATGATA | 108 | 3125 |
| 937939 | N/A | N/A | 83791 | 83810 | TGTTGCACATAGGTTAGAAT | 5 | 3126 |
| 937951 | N/A | N/A | 84180 | 84199 | TAGCTAAAATTGAATGTCCA | 40 | 3127 |
| 937963 | N/A | N/A | 84410 | 84429 | TAAGTATCATATATTTCTCA | 41 | 3128 |
| 937975 | N/A | N/A | 84756 | 84775 | TTGGAATCTTATTAAGCAAG | 15 | 3129 |
| 937987 | N/A | N/A | 84813 | 84832 | GTTCCTTACAATTATCTATG | 8 | 3130 |
| 937999 | N/A | N/A | 85051 | 85070 | GTTAATTAGGATCTATACAC | 40 | 3131 |
| 938011 | N/A | N/A | 85182 | 85201 | ACATTTTAACCCTTTGAGGA | 49 | 3132 |
| 938023 | N/A | N/A | 92248 | 92267 | TAGGCAAAGACCACTTTAAA | 64 | 3133 |
| 938035 | N/A | N/A | 96398 | 96417 | ATGTAATTCTTAAAAAAACC | 86 | 3134 |
| 938047 | N/A | N/A | 97626 | 97645 | GAGATAAGACTTTTTATGTT | 27 | 3135 |
| 938059 | N/A | N/A | 99449 | 99468 | GTTCTAAACTATTTATAGAC | 98 | 3136 |
| 938071 | N/A | N/A | 104201 | 104220 | TGAAGAACATTATGCAAAAA | 77 | 3137 |
| 938083 | N/A | N/A | 109630 | 109649 | ACTGACTAAAGCACCCTTGG | 76 | 3138 |
| 938095 | N/A | N/A | 116416 | 116435 | ACTACAAGCAAACACAGGCA | 72 | 3139 |
| 938107 | N/A | N/A | 119024 | 119043 | TCCCATTGCATTGTTTTAAG | 16 | 3140 |
| 938119 | N/A | N/A | 120188 | 120207 | AATGACACTTCATAACCACT | 34 | 3141 |
| 938131 | N/A | N/A | 124921 | 124940 | GGTGAAACTTAAGACTTAAA | 16 | 3142 |
| 938143 | N/A | N/A | 128091 | 128110 | TACAACCCCTAAGGAAATAA | 57 | 3143 |
| 938155 | N/A | N/A | 129794 | 129813 | ACTTTGTTACTTATTACCTT | 23 | 3144 |
| 938167 | N/A | N/A | 132158 | 132177 | TATTATTCTCACATATAAAT | 84 | 3145 |
| 938179 | N/A | N/A | 132402 | 132421 | ACTACGGTAGTTCTCAGAAA | 38 | 3146 |
| 938191 | N/A | N/A | 132648 | 132667 | TATAAATTCTTAAATAACTC | 97 | 3147 |
| 938203 | N/A | N/A | 134199 | 134218 | CCAGCTCCTAGTGTCCTTTT | 52 | 3148 |
| 938215 | N/A | N/A | 136866 | 136885 | GGTTGACATATTAGTAATTT | 27 | 3149 |
| 938227 | N/A | N/A | 138522 | 138541 | CACCCCAAAATAACTCAAAA | 71 | 3150 |
| 938239 | N/A | N/A | 139275 | 139294 | GTGTGTTTAATTTGTAACTA | 14 | 3151 |
| 938251 | N/A | N/A | 142950 | 142969 | GCAAACACAGACATATGCAG | 65 | 3152 |
| 938263 | N/A | N/A | 145980 | 145999 | TTCCAAGGTAAGTGTGTAGG | 41 | 3153 |
| 938275 | N/A | N/A | 146860 | 146879 | AACAGAGTGAGGTTTTAGGG | 20 | 3154 |

TABLE 43
Percent control of human ATXN2 RNA with 5-10-5 MOE gapmers
with mixed internucleoside linkages

| | SEQ ID | SEQ ID | SEQ ID | SEQ ID | | | |
|---|---|---|---|---|---|---|---|
| | NO: 1 | NO: 1 | NO: 2 | NO: 2 | | | |
| Compound | Start | Stop | Start | Stop | | ATXN2 % | SEQ |
| Number | Site | Site | Site | Site | Sequence (5′ to 3′) | control | ID NO |
| 708199 | 1477 | 1496 | 81637 | 81656 | GCTAACTGGTTTGCCCTTGC | 17 | 32 |
| 937365 | 1560 | 1579 | 81720 | 81739 | CTGTGTATTTTTCTTCCTCA | 6 | 3155 |
| 937377 | 3490 | 3509 | 136963 | 136982 | GTCTCCTTGTTGTATGGTAA | 21 | 3156 |
| 937389 | 4401 | 4420 | 149152 | 149171 | CTGATGTGTTCATGACTTTC | 15 | 3157 |
| 937400 | 4421 | 4440 | 149172 | 149191 | CTTGTTACTTCTTTTGCTAG | 30 | 3158 |
| 937412 | N/A | N/A | 3802 | 3821 | GCCCGCCCCCTGCCACCAGC | 60 | 3159 |
| 937424 | N/A | N/A | 4528 | 4547 | GTAGTGTTTGGGATGCTTCA | 8 | 3160 |
| 937436 | N/A | N/A | 4748 | 4767 | GCAACTTAATAACCTTAGTT | 7 | 3161 |
| 937448 | N/A | N/A | 5951 | 5970 | CTACAAAATAACATACACAA | 77 | 3162 |
| 937460 | N/A | N/A | 7520 | 7539 | CCTAGTCACATTAGAATGTA | 95 | 3163 |
| 937472 | N/A | N/A | 9933 | 9952 | AGCTTAGAGTTTTTGCCTTC | 15 | 3164 |
| 937484 | N/A | N/A | 10353 | 10372 | ACACAGCATGATCTTGTGTA | 94 | 3165 |
| 937496 | N/A | N/A | 14454 | 14473 | CACAAAGTCCACAGCAAATG | 51 | 3166 |
| 937508 | N/A | N/A | 17157 | 17176 | TTGAATTACAATGCGGTATA | 9 | 3167 |
| 937520 | N/A | N/A | 18684 | 18703 | GGCCAGTATCTCAGTTTTTT | 91 | 3168 |
| 937532 | N/A | N/A | 19934 | 19953 | GTGCGCATCATTACGACCAT | 49 | 3169 |
| 937544 | N/A | N/A | 23251 | 23270 | TGTATTTTTACTCACCTTTT | 35 | 3170 |
| 937556 | N/A | N/A | 26045 | 26064 | CTAGTCTATACTACCACATA | 81 | 3171 |
| 937568 | N/A | N/A | 28079 | 28098 | GACTTTGAAATCTCACAAGG | 29 | 3172 |
| 937580 | N/A | N/A | 28495 | 28514 | ACCGGATTGTTTTCTTCATT | 15 | 3173 |
| 937592 | N/A | N/A | 28890 | 28909 | AAGTCTTGTTCAGTGTCCTT | 10 | 3174 |
| 937604 | N/A | N/A | 31032 | 31051 | TCCTCCTCTCTTCATGGCCT | 85 | 3175 |
| 937616 | N/A | N/A | 32403 | 32422 | GAAATGAAGATGAAAATAGT | 88 | 3176 |
| 937628 | N/A | N/A | 32805 | 32824 | TTTCAGACTTCTTGTTGTTG | 20 | 3177 |
| 937640 | N/A | N/A | 32818 | 32837 | TTTGTTCTTCCAATTTCAGA | 35 | 3178 |
| 937652 | N/A | N/A | 36188 | 36207 | AGAAAAGATTGTATTTTACA | 70 | 3179 |
| 937664 | N/A | N/A | 36846 | 36865 | GTATTTACTACTTCTGCATG | 30 | 3180 |
| 937676 | N/A | N/A | 37600 | 37619 | GGTCGGCAAGCAGTGTCTTT | 37 | 3181 |
| 937688 | N/A | N/A | 41278 | 41297 | TTATGAGGGACTAGAGCATC | 41 | 3182 |
| 937700 | N/A | N/A | 43838 | 43857 | GTGTACTTATAGTCTGTACA | 70 | 3183 |
| 937712 | N/A | N/A | 47673 | 47692 | GTACTTTTACAATGAATTAT | 44 | 3184 |
| 937724 | N/A | N/A | 48749 | 48768 | AAATTACCTTCGGACTGTAA | 76 | 3185 |
| 937736 | N/A | N/A | 49150 | 49169 | CTCATCAAGGTACCAGTTCT | 30 | 3186 |
| 937748 | N/A | N/A | 49980 | 49999 | GGACAAGAAATTTTCAGTTG | 11 | 3187 |
| 937760 | N/A | N/A | 51971 | 51990 | ACCTGATGTCCTAAACACAT | 65 | 3188 |
| 937772 | N/A | N/A | 54912 | 54931 | AGATACACGAATACAGAGCC | 77 | 3189 |
| 937784 | N/A | N/A | 57158 | 57177 | AGAGCTCAAACTGTAACAGG | 51 | 3190 |
| 937796 | N/A | N/A | 57987 | 58006 | ATGCAGTACAACATTCCATT | 10 | 3191 |
| 937808 | N/A | N/A | 59479 | 59498 | AATCTACTTTTATGTCTCCT | 20 | 3192 |
| 937820 | N/A | N/A | 61420 | 61439 | AAACCATCCAAGACAAGAGA | 51 | 3193 |
| 937832 | N/A | N/A | 67596 | 67615 | TCTAGTGAGTATAAAAATAT | 55 | 3194 |
| 937844 | N/A | N/A | 69106 | 69125 | CTGAGTTCTATAGGTGCTTA | 69 | 3195 |
| 937856 | N/A | N/A | 71745 | 71764 | TTAACATCAGATTTAACATC | 66 | 3196 |
| 937868 | N/A | N/A | 73832 | 73851 | ACTAGAAATCTGACCTTATT | 71 | 3197 |
| 937880 | N/A | N/A | 75267 | 75286 | TATCAATCCATCAAAAATAT | 72 | 3198 |
| 937892 | N/A | N/A | 82113 | 82132 | TCTGTATGTTCCTAGTACTT | 42 | 3199 |
| 937904 | N/A | N/A | 82509 | 82528 | GTTACCAAATTCTCACAGTT | 27 | 3200 |
| 937916 | N/A | N/A | 82856 | 82875 | TTTTTCATGGCTCCAATATC | 58 | 3201 |
| 937928 | N/A | N/A | 83465 | 83484 | AAGTATTTTAAGTATTTAGA | 94 | 3202 |
| 937940 | N/A | N/A | 83792 | 83811 | GTGTTGCACATAGGTTAGAA | 7 | 3203 |
| 937952 | N/A | N/A | 84258 | 84277 | TGGAGAAAAGACTCAATGAA | 58 | 3204 |
| 937964 | N/A | N/A | 84411 | 84430 | TTAAGTATCATATATTTCTC | 62 | 3205 |
| 937976 | N/A | N/A | 84757 | 84776 | TTTGGAATCTTATTAAGCAA | 42 | 3206 |
| 937988 | N/A | N/A | 84814 | 84833 | GGTTCCTTACAATTATCTAT | 18 | 3207 |
| 938000 | N/A | N/A | 85052 | 85071 | GGTTAATTAGGATCTATACA | 19 | 3208 |
| 938012 | N/A | N/A | 85183 | 85202 | TACATTTTAACCCTTTGAGG | 43 | 3209 |
| 938024 | N/A | N/A | 92255 | 92274 | TAAAGGATAGGCAAAGACCA | 51 | 3210 |
| 938036 | N/A | N/A | 97572 | 97591 | AGGTTTACAGAAAGTTGTGC | 22 | 3211 |
| 938048 | N/A | N/A | 97726 | 97745 | TCCTGGTATGCCCCTATGGA | 58 | 3212 |
| 938060 | N/A | N/A | 99771 | 99790 | TTACTATGGGTTGGACACTT | 61 | 3213 |
| 938072 | N/A | N/A | 104211 | 104230 | CCAGTGTCTCTGAAGAACAT | 50 | 3214 |
| 938084 | N/A | N/A | 109930 | 109949 | CCCTTGTGCCTTGAATAAAA | 79 | 3215 |
| 938096 | N/A | N/A | 116591 | 116610 | TATAATCACAACTGATGGGC | 28 | 3216 |
| 938108 | N/A | N/A | 119025 | 119044 | TTCCCATTGCATTGTTTTAA | 25 | 3217 |
| 938120 | N/A | N/A | 122100 | 122119 | CAAACAAAAAGGAATAAGCT | 76 | 3218 |
| 938132 | N/A | N/A | 125124 | 125143 | AAGGGCTGCCAGAAACAGTG | 44 | 3219 |
| 938144 | N/A | N/A | 128108 | 128127 | AAAGAATGTCACCATTTTAC | 44 | 3220 |
| 938156 | N/A | N/A | 129795 | 129814 | TACTTTGTTACTTATTACCT | 65 | 3221 |
| 938168 | N/A | N/A | 132159 | 132178 | TTATTATTCTCACATATAAA | 90 | 3222 |
| 938180 | N/A | N/A | 132466 | 132485 | TGAATAAACCAAAATTATCC | 71 | 3223 |
| 938192 | N/A | N/A | 133234 | 133253 | GATAATGTGGAAAATTAAGA | 75 | 3224 |
| 938204 | N/A | N/A | 134531 | 134550 | ATAGAACAAAACAATTCTTT | 90 | 3225 |
| 938216 | N/A | N/A | 136915 | 136934 | AAAGGTAAATTAGCCTTTTG | 88 | 3226 |
| 938228 | N/A | N/A | 138908 | 138927 | CCAAACTACTAACAGAGACA | 73 | 3227 |
| 938240 | N/A | N/A | 139341 | 139360 | TAACCACATTCCAGAACTAG | 81 | 3228 |
| 938252 | N/A | N/A | 143062 | 143081 | TATAGTTCCCAGCCCTCTCT | 63 | 3229 |
| 938264 | N/A | N/A | 146037 | 146056 | CCCCGGTAGTCACTTCGGAG | 86 | 3230 |
| 938276 | N/A | N/A | 146917 | 146936 | GGGCACATGGCAAATTTGAG | 32 | 3231 |

### Example 4: Effect of 5-10-5 MOE Gapmer. With Mixed Internucleoside Linkages on Human ATXN2 RNA Expression In Vitro, Multiple Doses

[0510] Modified oligonucleotides selected from the examples above were tested at various doses in SCA2-04 cells. Cells were plated at a density of 20,000 cells per well and transfected using electroportion with 31.25 nM, 125.00 nM, 500.00 nM, and 2,000.00 nM concentrations of modified oligonucleotide, as specified in the tables below. After a treatment period of approximately 24 hours, total RNA was isolated from the cells and ATXN2 RNA levels were measured by quantitative real-time PCR. Human ATXN2 primer probe set hAtaxin_LTS01321 (described hereinabove in Example 1) was used to measure RNA Levels. ATXN2 RNA Levels were adjusted according to total RNA content, as measured by RIBOGREEN®. Results are presented in the tables below as percent ATXN2 RNA expression relative to untreated control cells. As illustrated in the tables below, ATXN2 RNA levels were reduced in a dose-dependent manner in modified oligonucleotide-treated cells. IC₅₀ was calculated using the “log(inhibitor) vs. response—variable slope (4 parameters)” formula u sing Prism6 software.

TABLE 44
Dose-dependent reduction of human ATXN2 RNA
expression in SCA2-04 cells

| Com- | | | | | |
|---|---|---|---|---|---|
| pound | ATXN2 expression (% control) | | | | IC₅₀ |
| Number | 31.25 nM | 125.00 nM | 500.00 nM | 2,000.00 nM | (μM) |
| 708199 | 126 | 94 | 59 | 30 | 0.8 |
| 755233 | 119 | 113 | 93 | 41 | >2.0 |
| 756959 | 132 | 118 | 89 | 32 | 1.5 |
| 756960 | 106 | 103 | 90 | 36 | 2.0 |
| 756978 | 106 | 105 | 56 | 20 | 0.7 |
| 756980 | 128 | 126 | 83 | 35 | 2.0 |
| 756981 | 98 | 95 | 72 | 38 | 1.6 |
| 756985 | 98 | 517 | 84 | 33 | 1.5 |
| 756989 | 134 | 137 | 87 | 52 | >2.0 |
| 756991 | 117 | 204 | 77 | 37 | 1.4 |
| 756993 | 137 | 138 | 67 | 21 | 1.0 |
| 756996 | 128 | 104 | 81 | 33 | 1.3 |
| 756997 | 120 | 111 | 82 | 24 | 1.1 |
| 757000 | 122 | 114 | 86 | 32 | 1.5 |
| 757052 | 85 | 77 | 43 | 15 | 0.3 |
| 757055 | 92 | 86 | 58 | 27 | 0.7 |
| 757057 | 133 | 127 | 87 | 42 | 2.0 |
| 757066 | 91 | 81 | 59 | 19 | 0.5 |
| 757072 | 151 | 125 | 88 | 39 | 1.7 |

TABLE 45
Dose-dependent reduction of human ATXN2
RNA expression in SCA2-04 cells

| Com- | | | | | |
|---|---|---|---|---|---|
| pound | ATXN2 expression (% control) | | | | IC₅₀ |
| Number | 31.25 nM | 125.00 nM | 500.00 nM | 2,000.00 nM | (μM) |
| 708199 | 113 | 111 | 64 | 21 | 0.8 |
| 755237 | 159 | 151 | 97 | 38 | 1.9 |
| 755239 | 69 | 82 | 43 | 25 | 0.4 |
| 757028 | 110 | 158 | 145 | 53 | >2.0 |
| 757034 | 125 | 125 | 105 | 35 | 1.6 |
| 757037 | 142 | 151 | 117 | 49 | >2.0 |
| 757040 | 117 | 103 | 81 | 21 | 0.9 |
| 757045 | 254 | 153 | 113 | 35 | 1.6 |
| 757073 | 163 | 141 | 116 | 55 | >2.0 |
| 757075 | 120 | 102 | 81 | 48 | >2.0 |
| 757089 | 101 | 90 | 62 | 27 | 0.8 |
| 757094 | 202 | 161 | 86 | 34 | 1.3 |
| 757104 | 140 | 182 | 151 | 72 | >2.0 |
| 757116 | 100 | 93 | 69 | 42 | 1.5 |
| 757127 | 98 | 94 | 67 | 34 | 1.1 |
| 757129 | 89 | 83 | 67 | 37 | 1.2 |
| 757130 | 109 | 85 | 50 | 22 | 0.5 |
| 757131 | 152 | 103 | 66 | 30 | 0.9 |
| 757218 | 131 | 123 | 113 | 53 | >2.0 |

TABLE 46
Dose-dependent reduction of human ATXN2
RNA expression in SCA2-04 cells

| Com- | | | | | |
|---|---|---|---|---|---|
| pound | ATXN2 expression (% control) | | | | IC₅₀ |
| Number | 31.25 nM | 125.00 nM | 500.00 nM | 2,000.00 nM | (μM) |
| 708199 | 95 | 54 | 28 | 17 | 0.2 |
| 757161 | 100 | 95 | 61 | 32 | 0.9 |
| 757162 | 97 | 83 | 51 | 19 | 0.5 |
| 757175 | 101 | 84 | 60 | 25 | 0.7 |
| 757209 | 102 | 77 | 69 | 27 | 0.8 |
| 757210 | 112 | 95 | 51 | 30 | 0.7 |
| 757213 | 105 | 102 | 63 | 31 | 1.0 |
| 757219 | 112 | 89 | 67 | 37 | 1.1 |
| 757226 | 102 | 84 | 55 | 31 | 0.7 |
| 757228 | 92 | 104 | 65 | 36 | 1.3 |
| 757234 | 96 | 94 | 58 | 29 | 0.8 |
| 757250 | 85 | 92 | 64 | 46 | 2.0 |
| 757267 | 108 | 92 | 60 | 40 | 1.1 |
| 757272 | 95 | 88 | 48 | 35 | 0.7 |
| 757294 | 98 | 101 | 73 | 47 | >2.0 |
| 757311 | 91 | 62 | 55 | 24 | 0.4 |
| 757364 | 98 | 76 | 53 | 31 | 0.6 |
| 757371 | 107 | 97 | 73 | 38 | 1.4 |
| 757372 | 64 | 94 | 74 | 45 | 1.6 |

### Example 5: Effect of 5-10-5 MOE Gapmer. With Mixed Internucleoside Linkages on Human ATIXN2 RNA Expression In Vitro, Multiple Doses

[0511] Modified oligonucleotides selected from the examples above were tested at various doses in A431 cells. Cells were plated at a density of 10,000 cells per well and transfected by free uptake with 0.44 μM, 1.33 μM, 4.00 μM, and 12.00 μM concentrations of modified oligonucleotide, as specified in the tables below. After a treatment period of approximately 24 hours, total RNA was isolated from the cells and ATXN2 RNA levels were measured by quantitative real-time PCR. Human ATXN2 primer probe set RTS5049 (described hereinabove in Example 2) was used to measure RNA levels. ATXN2 RNA levels were adjusted according to total RNA content, as measured by RIBOGREEN®. Results are presented in the tables below as percent ATXN2 RNA expression relative to untreated control. As illustrated in the tables below, ATXN2 RNA levels were reduced in a dose-dependent manner in modified oligonucleotide-treated cells. IC₅₀ was calculated using the “log(inhibitor) vs. response—variable slope (4 parameters)” formula u sing Prism6 software.

TABLE 47
Dose-dependent reduction of human ATXN2
RNA expression in A431 cells

| Compound | ATXN2 expression (% control) | | | | IC₅₀ |
|---|---|---|---|---|---|
| Number | 0.44 μM | 1.33 μM | 4.00 μM | 12.00 μM | (μM) |
| 708199 | 65 | 45 | 36 | 23 | 1.2 |
| 874225 | 89 | 72 | 64 | 52 | >12.0 |
| 874247 | 50 | 37 | 22 | 13 | <0.4 |
| 874248 | 67 | 54 | 45 | 32 | 2.2 |
| 874249 | 67 | 56 | 32 | 27 | 1.6 |
| 874272 | 64 | 51 | 35 | 27 | 1.4 |
| 874273 | 53 | 50 | 34 | 32 | 0.8 |
| 874702 | 34 | 25 | 16 | 13 | <0.4 |
| 874748 | 50 | 44 | 28 | 16 | 0.6 |
| 875060 | 63 | 44 | 27 | 14 | 1.0 |
| 875252 | 65 | 61 | 37 | 25 | 1.8 |
| 875325 | 105 | 80 | 61 | 46 | 8.4 |
| 875348 | 58 | 41 | 26 | 21 | 0.7 |
| 875398 | 54 | 33 | 20 | 11 | 0.5 |
| 875445 | 65 | 55 | 39 | 24 | 1.7 |
| 875733 | 65 | 54 | 41 | 33 | 1.9 |
| 875804 | 57 | 34 | 27 | 13 | 0.6 |
| 875805 | 83 | 70 | 58 | 45 | 7.6 |
| 875877 | 88 | 68 | 59 | 46 | 8.1 |

TABLE 48
Dose-dependent reduction of human ATXN2
RNA expression in A431 cells

| Compound | ATXN2 expression (% control) | | | | IC₅₀ |
|---|---|---|---|---|---|
| Number | 0.44 μM | 1.33 μM | 4.00 μM | 12.00 μM | (μM) |
| 708199 | 57 | 46 | 35 | 24 | 0.9 |
| 874250 | 60 | 51 | 33 | 21 | 1.1 |
| 874251 | 67 | 49 | 41 | 32 | 1.8 |
| 874297 | 82 | 82 | 69 | 53 | >12.0 |
| 874369 | 78 | 64 | 49 | 36 | 4.0 |
| 874415 | 62 | 56 | 38 | 26 | 1.6 |
| 874560 | 44 | 26 | 16 | 10 | <0.4 |
| 874703 | 75 | 59 | 47 | 24 | 2.5 |
| 874752 | 43 | 26 | 18 | 11 | <0.4 |
| 874799 | 70 | 63 | 43 | 28 | 2.5 |
| 875063 | 68 | 58 | 41 | 26 | 2.0 |
| 875328 | 27 | 15 | 9 | 7 | <0.4 |
| 875351 | 54 | 39 | 30 | 20 | 0.5 |
| 875352 | 80 | 66 | 52 | 40 | 5.1 |
| 875807 | 68 | 45 | 38 | 27 | 1.4 |
| 875831 | 61 | 50 | 44 | 36 | 1.7 |
| 875879 | 50 | 41 | 31 | 22 | 0.4 |
| 875880 | 61 | 50 | 37 | 30 | 1.3 |
| 875904 | 69 | 53 | 49 | 33 | 2.5 |

TABLE 49
Dose-dependent reduction of human ATXN2
RNA expression in A431 cells

| Compound | ATXN2 expression (% control) | | | | IC₅₀ |
|---|---|---|---|---|---|
| Number | 0.44 μM | 1.33 μM | 4.00 μM | 12.00 μM | (μM) |
| 708199 | 66 | 53 | 35 | 28 | 1.6 |
| 708399 | 87 | 77 | 55 | 33 | 5.1 |
| 874229 | 72 | 62 | 45 | 72 | >12.0 |
| 874254 | 72 | 63 | 49 | 35 | 3.5 |
| 874276 | 78 | 67 | 57 | 39 | 5.5 |
| 874277 | 60 | 48 | 46 | 41 | 1.8 |
| 874300 | 80 | 64 | 41 | 30 | 3.0 |
| 874610 | 58 | 45 | 24 | 13 | 0.8 |
| 874682 | 79 | 59 | 44 | 31 | 2.9 |
| 874706 | 57 | 39 | 26 | 13 | 0.7 |
| 874753 | 41 | 37 | 25 | 12 | <0.4 |
| 874754 | 52 | 40 | 24 | 11 | 0.5 |
| 874874 | 67 | 50 | 35 | 21 | 1.4 |
| 874969 | 74 | 55 | 36 | 17 | 1.8 |
| 875401 | 91 | 83 | 68 | 39 | 8.7 |
| 875427 | 74 | 49 | 38 | 23 | 1.8 |
| 875571 | 72 | 62 | 40 | 27 | 2.3 |
| 875834 | 69 | 58 | 45 | 37 | 3.0 |
| 875954 | 73 | 53 | 46 | 31 | 2.5 |

TABLE 50
Dose-dependent reduction of human ATXN2
RNA expression in A431 cells

| Compound | ATXN2 expression (% control) | | | | IC₅₀ |
|---|---|---|---|---|---|
| Number | 0.44 μM | 1.33 μM | 4.00 μM | 12.00 μM | (μM) |
| 708199 | 70 | 43 | 34 | 23 | 1.3 |
| 874211 | 65 | 50 | 39 | 33 | 1.7 |
| 874212 | 64 | 51 | 37 | 24 | 1.4 |
| 874279 | 68 | 54 | 39 | 20 | 1.6 |
| 874280 | 32 | 20 | 13 | 8 | <0.4 |
| 874281 | 48 | 39 | 22 | 14 | <0.4 |
| 874325 | 70 | 65 | 50 | 39 | 4.2 |
| 874327 | 55 | 36 | 32 | 25 | 0.5 |
| 874348 | 55 | 10 | 109 | 52 | >12.0 |
| 874541 | 3 | 3 | 31743 | 32 | <0.4 |
| 874685 | 81 | 78 | 56 | 46 | 8.6 |
| 874947 | 93 | 73 | 60 | 35 | 5.6 |
| 875404 | 61 | 54 | 39 | 22 | 1.4 |
| 875405 | 92 | 72 | 57 | 36 | 5.5 |
| 875452 | 62 | 42 | 26 | 14 | 0.9 |
| 875477 | 61 | 57 | 44 | 34 | 2.0 |
| 875572 | 44 | 36 | 29 | 72 | <0.4 |
| 875764 | 49 | 40 | 23 | 14 | <0.4 |
| 875956 | 75 | 55 | 50 | 45 | 4.8 |

TABLE 51
Dose-dependent reduction of human ATXN2
RNA expression in A431 cells

| Compound | ATXN2 expression (% control) | | | | IC₅₀ |
|---|---|---|---|---|---|
| Number | 0.44 μM | 1.33 μM | 4.00 μM | 12.00 μM | (μM) |
| 708199 | 80 | 49 | 37 | 23 | 2.0 |
| 874258 | 74 | 67 | 45 | 52 | >12.0 |
| 874282 | 41 | 36 | 21 | 13 | <0.4 |
| 874283 | 73 | 44 | 33 | 24 | 1.5 |
| 874591 | 79 | 66 | 53 | 50 | 8.4 |
| 874615 | 74 | 64 | 45 | 33 | 3.1 |
| 874639 | 46 | 30 | 17 | 10 | <0.4 |
| 874782 | 57 | 46 | 36 | 26 | 0.9 |
| 874806 | 84 | 84 | 61 | 47 | 11.1 |
| 874807 | 76 | 61 | 53 | 38 | 4.3 |
| 874856 | 78 | 59 | 34 | 28 | 2.3 |
| 874903 | 67 | 59 | 40 | 33 | 2.2 |
| 874951 | 72 | 61 | 52 | 42 | 4.8 |
| 874952 | 60 | 43 | 27 | 19 | 0.9 |
| 874999 | 93 | 77 | 55 | 29 | 4.6 |
| 875360 | 61 | 42 | 29 | 22 | 0.8 |
| 875670 | 84 | 63 | 49 | 28 | 3.3 |
| 875886 | 76 | 60 | 42 | 25 | 2.4 |
| 875959 | 75 | 58 | 41 | 37 | 2.9 |

TABLE 52
Dose-dependent reduction of human ATXN2
RNA expression in A431 cells

| Compound | ATXN2 expression (% control) | | | | IC₅₀ |
|---|---|---|---|---|---|
| Number | 0.44 μM | 1.33 μM | 4.00 μM | 12.00 μM | (μM) |
| 708199 | 74 | 44 | 32 | 25 | 1.5 |
| 874216 | 81 | 55 | n.d. | 16 | 2.0 |
| 874217 | 51 | 40 | 29 | 26 | <0.4 |
| 874237 | 66 | 59 | 43 | 30 | 2.2 |
| 874238 | 86 | 58 | 42 | 37 | 3.4 |
| 874307 | 173 | 64 | 64 | 68 | >12.0 |
| 874544 | 92 | 78 | 71 | 54 | >12.0 |
| 874547 | 80 | 59 | 46 | 34 | 3.3 |
| 874568 | 77 | 59 | 42 | 32 | 2.8 |
| 874571 | 106 | 79 | 55 | 38 | 5.9 |
| 874643 | 85 | 62 | 40 | 35 | 3.3 |
| 874738 | 65 | 46 | 37 | 25 | 1.3 |
| 874785 | 71 | 58 | 38 | 25 | 2.0 |
| 874858 | 93 | 86 | 65 | 66 | >12.0 |
| 875458 | 42 | 28 | 19 | 12 | <0.4 |
| 875650 | 63 | 46 | 31 | 19 | 1.1 |
| 875793 | 89 | 93 | 78 | 64 | >12.0 |
| 875840 | 97 | 81 | 79 | 48 | >12.0 |
| 875914 | 60 | 48 | 42 | 38 | 1.5 |

TABLE 53
Dose-dependent reduction of human ATXN2
RNA expression in A431 cells

| Compound | ATXN2 expression (% control) | | | | IC₅₀ |
|---|---|---|---|---|---|
| Number | 0.44 μM | 1.33 μM | 4.00 μM | 12.00 μM | (μM) |
| 708199 | 59 | 44 | 29 | 21 | 0.8 |
| 874288 | 64 | 40 | n.d. | 16 | 0.9 |
| 874334 | 57 | 38 | 29 | 28 | 0.6 |
| 874335 | 56 | 37 | 32 | 27 | 0.6 |
| 874430 | 60 | 49 | 32 | 25 | 1.1 |
| 874501 | 54 | 41 | 33 | 21 | 0.6 |
| 874548 | 68 | 49 | 34 | 23 | 1.4 |
| 874669 | 40 | 20 | 12 | 10 | <0.4 |
| 874764 | 77 | 53 | 51 | 33 | 3.1 |
| 875148 | 60 | 43 | 39 | 26 | 1.0 |
| 875196 | 84 | 85 | 64 | 38 | 7.8 |
| 875315 | 63 | 54 | 36 | 31 | 1.6 |
| 875341 | 62 | 40 | 30 | 20 | 0.9 |
| 875389 | 66 | 56 | 38 | 29 | 1.8 |
| 875485 | 52 | 23 | 16 | 13 | <0.4 |
| 875508 | 63 | 57 | 48 | 33 | 2.4 |
| 875798 | 59 | 42 | 31 | 17 | 0.8 |
| 875820 | 72 | 67 | 45 | 35 | 3.4 |
| 875966 | 45 | 31 | 24 | 19 | <0.4 |

TABLE 54
Dose-dependent reduction of human ATXN2
RNA expression in A431 cells

| Compound | ATXN2 expression (% control) | | | | IC₅₀ |
|---|---|---|---|---|---|
| Number | 0.44 μM | 1.33 μM | 4.00 μM | 12.00 μM | (μM) |
| 708199 | 59 | 47 | 28 | 20 | 0.9 |
| 874359 | 84 | 65 | n.d. | 16 | 6.1 |
| 874360 | 75 | 62 | 43 | 38 | 3.3 |
| 874384 | 50 | 47 | 34 | 32 | <0.4 |
| 874385 | 50 | 35 | 29 | 31 | <0.4 |
| 874503 | 32 | 21 | 14 | 6 | <0.4 |
| 874745 | 65 | 41 | 27 | 16 | 1.0 |
| 874792 | 58 | 39 | 26 | 19 | 0.7 |
| 874937 | 64 | 55 | 30 | 22 | 1.4 |
| 875032 | 35 | 21 | 11 | 6 | <0.4 |
| 875319 | 53 | 36 | 22 | 15 | 0.5 |
| 875414 | 68 | 59 | 42 | 28 | 2.2 |
| 875416 | 74 | 58 | 48 | 35 | 3.3 |
| 875512 | 68 | 57 | 42 | 31 | 2.2 |
| 875680 | 47 | 32 | 22 | 15 | <0.4 |
| 875799 | 49 | 39 | 26 | 14 | <0.4 |
| 875822 | 62 | 53 | 39 | 27 | 1.5 |
| 875895 | 76 | 52 | 41 | 33 | 2.4 |
| 875991 | 65 | 48 | 40 | 27 | 1.5 |

TABLE 55
Dose-dependent reduction of human ATXN2 RNA
expression in A431 cells

| Compound | ATXN2 expression (% control) | | | | IC₅₀ |
|---|---|---|---|---|---|
| Number | 0.44 μM | 1.33 μM | 4.00 μM | 12.00 μM | (μM) |
| 708199 | 56 | 50 | 36 | 23 | 1.0 |
| 874244 | 85 | 82 | n.d. | 16 | >12.0 |
| 874246 | 53 | 40 | 30 | 23 | 0.5 |
| 874388 | 54 | 51 | 41 | 29 | 1.0 |
| 874506 | 44 | 24 | 17 | 8 | <0.4 |
| 874554 | 30 | 17 | 10 | 4 | <0.4 |
| 874627 | 33 | 28 | 17 | 10 | <0.4 |
| 874674 | 83 | 75 | 62 | 45 | 9.4 |
| 874699 | 60 | 39 | 23 | 17 | 0.7 |
| 874771 | 28 | 19 | 10 | 7 | <0.4 |
| 874842 | 60 | 44 | 29 | 20 | 0.9 |
| 874939 | 45 | 34 | 21 | 15 | <0.4 |
| 875083 | 74 | 57 | 46 | 26 | 2.4 |
| 875346 | 55 | 52 | 38 | 26 | 1.0 |
| 875347 | 47 | 35 | 39 | 26 | <0.4 |
| 875489 | 75 | 71 | 45 | 37 | 3.9 |
| 875490 | 76 | 68 | 52 | 31 | 3.7 |
| 875681 | 81 | 76 | 61 | 39 | 7.0 |
| 875803 | 63 | 53 | 38 | 22 | 1.4 |

### Example 6: Effect of 5-10-5 MOE Gapmers with Mixed Internucleoside Linkages on Human ATXN2 in Vitro, Multiple Doses

[0512] Modified oligonucleotides selected from the examples above were tested at various doses in A431 cells. Cells were plated at a density of 10,000 cells per well and transfected by free uptake with 0.094, 0.375, 1.500, and 6.000 μM concentrations of modified oligonucleotide, as specified in the tables below. After a treatment period of approximately 24 hours, total RNA was isolated from the cells and ATXN2 RNA levels were measured by quantitative real-time PCR. Human ATXN2 primer probe set RTS5049 (described hereinabove in Example 2) was used to measure RNA levels. ATXN2 RNA levels were adjusted according to total RNA content, as measured by RIBOGREEN®. Results are presented in the tables below as percent ATXN2 RNA expression relative to untreated control cells. As illustrated in the tables below, ATXN2 RNA levels were reduced in a dose-dependent manner in modified oligonucleotide-treated cells. IC₅₀ was calculated using the “log(inhibitor) vs. response—variable slope (4 parameters)” formula u sing Prism6 software.

TABLE 56
Dose-dependent reduction of human ATXN2
RNA expression in A431 cells

| Compound | ATXN2 expression (% control) | | | | IC₅₀ |
|---|---|---|---|---|---|
| Number | 0.094 μM | 0.375 μM | 1.500 μM | 6.000 μM | (μM) |
| 708199 | 72 | 52 | 28 | 14 | 0.4 |
| 937383 | 52 | 26 | n.d. | 16 | <0.1 |
| 937430 | 60 | 24 | 10 | 4 | 0.1 |
| 937466 | 85 | 62 | 34 | 19 | 0.7 |
| 937467 | 74 | 52 | 26 | 12 | 0.4 |
| 937478 | 66 | 44 | 23 | 12 | 0.3 |
| 937479 | 66 | 35 | 17 | 9 | 0.2 |
| 937611 | 79 | 54 | 31 | 15 | 0.5 |
| 937634 | 76 | 51 | 24 | 11 | 0.4 |
| 937754 | 73 | 34 | 10 | 3 | 0.2 |
| 937791 | 77 | 47 | 22 | 10 | 0.4 |
| 937934 | 65 | 37 | 16 | 8 | 0.2 |
| 937983 | 69 | 34 | 14 | 5 | 0.2 |
| 938042 | 91 | 58 | 27 | 17 | 0.7 |
| 938043 | 55 | 28 | 13 | 5 | 0.1 |
| 938151 | 70 | 48 | 27 | 12 | 0.3 |
| 938163 | 67 | 38 | 15 | 6 | 0.2 |
| 938174 | 97 | 67 | 31 | 15 | 0.9 |
| 938210 | 65 | 33 | 14 | 8 | 0.2 |

TABLE 57
Dose-dependent reduction of human ATXN2
RNA expression in A431 cells

| Compound | ATXN2 expression (% control) | | | | IC₅₀ |
|---|---|---|---|---|---|
| Number | 0.094 μM | 0.375 μM | 1.500 μM | 6.000 μM | (μM) |
| 708199 | 79 | 51 | 26 | 15 | 0.5 |
| 937385 | 33 | 15 | n.d. | 16 | <0.1 |
| 937420 | 68 | 38 | 20 | 10 | 0.2 |
| 937422 | 55 | 24 | 9 | 5 | <0.1 |
| 937456 | 76 | 51 | 21 | 8 | 0.4 |
| 937468 | 52 | 21 | 8 | 3 | <0.1 |
| 937470 | 51 | 25 | 9 | 3 | <0.1 |
| 937480 | 41 | 22 | 9 | 5 | <0.1 |
| 937494 | 85 | 64 | 34 | 16 | 0.7 |
| 937552 | 76 | 41 | 19 | 7 | 0.3 |
| 937578 | 76 | 39 | 23 | 10 | 0.3 |
| 937683 | 73 | 46 | 24 | 14 | 0.4 |
| 937792 | 73 | 39 | 21 | 9 | 0.3 |
| 937794 | 35 | 9 | 4 | 2 | <0.1 |
| 937804 | 68 | 42 | 19 | 7 | 0.3 |
| 937936 | 49 | 19 | 6 | 2 | <0.1 |
| 937938 | 63 | 31 | 15 | 11 | 0.1 |
| 937972 | 55 | 32 | 15 | 5 | 0.1 |
| 938044 | 66 | 39 | 24 | 10 | 0.2 |

TABLE 58
Dose-dependent reduction of human ATXN2
RNA expression in A431 cells

| Compound | ATXN2 expression (% control) | | | | IC₅₀ |
|---|---|---|---|---|---|
| Number | 0.094 μM | 0.375 μM | 1.500 μM | 6.000 μM | (μM) |
| 708199 | 77 | 45 | 27 | 16 | 0.4 |
| 937365 | 63 | 36 | n.d. | 16 | 0.2 |
| 937423 | 81 | 41 | 20 | 11 | 0.4 |
| 937424 | 67 | 37 | 19 | 11 | 0.2 |
| 937436 | 82 | 39 | 15 | 5 | 0.3 |
| 937471 | 57 | 20 | 7 | 2 | <0.1 |
| 937508 | 78 | 52 | 23 | 8 | 0.4 |
| 937579 | 61 | 35 | 14 | 7 | 0.2 |
| 937591 | 50 | 28 | 9 | 4 | <0.1 |
| 937592 | 67 | 35 | 15 | 6 | 0.2 |
| 937639 | 64 | 39 | 15 | 7 | 0.2 |
| 937748 | 83 | 55 | 21 | 10 | 0.5 |
| 937795 | 60 | 28 | 11 | 6 | 0.1 |
| 937796 | 76 | 55 | 23 | 11 | 0.4 |
| 937939 | 39 | 20 | 10 | 5 | <0.1 |
| 937940 | 63 | 28 | 12 | 6 | 0.1 |
| 937962 | 90 | 62 | 32 | 13 | 0.7 |
| 937987 | 77 | 46 | 24 | 14 | 0.4 |
| 938238 | 87 | 55 | 40 | 20 | 0.8 |

TABLE 59
Dose-dependent reduction of human ATXN2
RNA expression in A431 cells

| Compound | ATXN2 expression (% control) | | | | IC₅₀ |
|---|---|---|---|---|---|
| Number | 0.094 μM | 0.375 μM | 1.500 μM | 6.000 μM | (μM) |
| 708199 | 80 | 46 | 29 | 13 | 0.4 |
| 937378 | 66 | 37 | n.d. | 16 | 0.2 |
| 937389 | 64 | 38 | 19 | 15 | 0.2 |
| 937425 | 63 | 40 | 18 | 9 | 0.2 |
| 937437 | 82 | 53 | 19 | 7 | 0.4 |
| 937472 | 86 | 52 | 34 | 16 | 0.6 |
| 937509 | 86 | 53 | 28 | 12 | 0.6 |
| 937510 | 76 | 51 | 21 | 8 | 0.4 |
| 937546 | 73 | 43 | 20 | 9 | 0.3 |
| 937580 | 68 | 40 | 20 | 12 | 0.2 |
| 937593 | 68 | 39 | 15 | 5 | 0.2 |
| 937618 | 50 | 24 | 13 | 6 | <0.1 |
| 937725 | 84 | 48 | 24 | 12 | 0.5 |
| 937737 | 70 | 38 | 20 | 12 | 0.2 |
| 937738 | 62 | 35 | 15 | 6 | 0.2 |
| 937941 | 73 | 53 | 29 | 13 | 0.4 |
| 937942 | 67 | 45 | 19 | 10 | 0.3 |
| 937989 | 65 | 42 | 16 | 8 | 0.2 |
| 938170 | 53 | 23 | 10 | 4 | <0.1 |

TABLE 60
Dose-dependent reduction of human ATXN2
RNA expression in A431 cells

| Compound | ATXN2 expression (% control) | | | | IC₅₀ |
|---|---|---|---|---|---|
| Number | 0.094 μM | 0.375 μM | 1.500 μM | 6.000 μM | (μM) |
| 708199 | 74 | 45 | 24 | 15 | 0.4 |
| 937426 | 84 | 63 | n.d. | 16 | 0.6 |
| 937428 | 63 | 41 | 20 | 10 | 0.2 |
| 937474 | 74 | 42 | 19 | 9 | 0.3 |
| 937511 | 82 | 51 | 24 | 18 | 0.5 |
| 937547 | 67 | 41 | 14 | 5 | 0.2 |
| 937572 | 74 | 46 | 21 | 9 | 0.3 |
| 937595 | 95 | 66 | 39 | 16 | 0.9 |
| 937619 | 63 | 39 | 14 | 7 | 0.2 |
| 937620 | 61 | 37 | 18 | 10 | 0.2 |
| 937666 | 79 | 41 | 23 | 13 | 0.4 |
| 937680 | 70 | 38 | 17 | 7 | 0.3 |
| 937739 | 86 | 49 | 22 | 10 | 0.5 |
| 937918 | 73 | 41 | 21 | 12 | 0.3 |
| 937991 | 75 | 49 | 20 | 12 | 0.4 |
| 938004 | 51 | 20 | 10 | 4 | <0.1 |
| 938136 | 68 | 38 | 20 | 7 | 0.2 |
| 938171 | 83 | 54 | 28 | 11 | 0.5 |
| 938172 | 78 | 44 | 20 | 9 | 0.4 |

TABLE 61
Dose-dependent reduction of human ATXN2
RNA expression in A431 cells

| Compound | ATXN2 expression (% control) | | | | IC₅₀ |
|---|---|---|---|---|---|
| Number | 0.094 μM | 0.375 μM | 1.500 μM | 6.000 μM | (μM) |
| 708199 | 80 | 48 | 30 | 14 | 0.5 |
| 937374 | 78 | 42 | n.d. | 16 | 0.4 |
| 937397 | 52 | 27 | 18 | 13 | <0.1 |
| 937421 | 72 | 35 | 13 | 5 | 0.2 |
| 937429 | 43 | 15 | 5 | 3 | <0.1 |
| 937465 | 41 | 14 | 6 | 3 | <0.1 |
| 937469 | 62 | 28 | 9 | 3 | 0.1 |
| 937477 | 75 | 49 | 21 | 10 | 0.4 |
| 937481 | 48 | 18 | 7 | 3 | <0.1 |
| 937621 | 69 | 45 | 24 | 12 | 0.3 |
| 937633 | 68 | 41 | 19 | 7 | 0.3 |
| 937933 | 93 | 42 | 23 | 12 | 0.5 |
| 937937 | 71 | 42 | 23 | 12 | 0.3 |
| 937973 | 53 | 22 | 7 | 3 | <0.1 |
| 938041 | 77 | 49 | 24 | 9 | 0.4 |
| 938045 | 73 | 50 | 27 | 11 | 0.4 |
| 938173 | 78 | 45 | 21 | 8 | 0.4 |
| 938221 | 58 | 26 | 14 | 7 | 0.1 |
| 938237 | 54 | 23 | 11 | 7 | <0.1 |

### Example 7: Design of Gapmers with Mixed Internucleoside Linkages Complementary to Human ATXN2 RNA

[0513] Modified oligonucleotides complementary to a human ATXN2 nucleic acid were designed. The modified oligonucleotides in the table below are gapmers. The gapmers have a central gap segment that comprises 2′-deoxynucleosides and is flanked by wing segments on both the 5′ end on the 3′ end comprising 2′-MOE nucleosides. The internucleoside linkages are mixed phosphodiester internucleoside linkages and phosphorothioate internucleoside linkages. Each cytosine residue is a 5-methyl cytosine. The sequence and chemical notation column specifies the sequence, including 5-methyl cytosines, sugar chemistry, and the internucleoside linkage chemistry, wherein subscript ‘d’ represents a 2′-deoxyribose sugar, subscript ‘e’ represents a 2′-MOE modified sugar, subscript ‘o’ represents a phosphodiester internucleoside linkage; subscript ‘s’ represents a phosphorothioate internucleoside linkage; and a ‘m’ superscript before the cytosine residue indicates a 5-methyl cytosine. “Start Site” indicates the 5′-most nucleoside to which the gapmer is complementary in the human nucleic acid sequence. “Stop Site” indicates the 3′-most nucleoside to which the gapmer is complementary in the human nucleic acid sequence.

[0514] Each modified oligonucleotide listed in the table below is complementary to human ATXN2 nucleic acid sequence SEQ ID NO: 1 or SEQ ID NO: 2, as indicated. ‘N/A’ indicates that the modified oligonucleotide is not complementary to that particular nucleic acid with 100% complementarity.

TABLE 62

| Modified oligonucleotides complementary to human ATXN2 RNA | | | | | | | | |
|---|---|---|---|---|---|---|---|---|
| | | | SEQ | SEQ | SEQ | SEQ | | |
| | | | ID | ID | ID | ID | | |
| | | | NO: 1 | NO: 1 | NO: 2 | NO: 2 | SEQ ID Nos: | |
| Compound | Gapmer | Sequence and chemistry notation | Start | Stop | Start | Stop | Un- | |
| Number | motif | (5′ to 3′) | Site | Site | Site | Site | modified | Modified |
| 702063 | 5-10-5 | ^{m}CₑₛTₑₒ^{m}CₑₒTₑₒ^{m}Cₑₛ^{m}C_{ds} A_{ds} T_{ds} | 1123 | 1142 | 49297 | 49316 | 33 | 3329 |
| | | T_{ds} A_{ds} T_{ds} T_{ds} T_{ds} ^{m}C_{ds} T_{ds} Tₑₒ ^{m}Cₑₒ | | | | | | |
| | | Aₑₛ^{m}Cₑₛ Gₑ | | | | | | |
| 708154 | 5-10-5 | Tₑₛ Gₑₒ Gₑₒ Aₑₒ Tₑₒ T_{ds} ^{m}C_{ds} T_{ds} G_{ds} | 1089 | 1108 | 49263 | 49282 | 3235 | 3330 |
| | | T_{ds} A_{ds} ^{m}C_{ds} T_{ds} T_{ds} T_{ds} Tₑₒ ^{m}Cₑₒ Tₑₛ | | | | | | |
| | | ^{m}Cₑₛ Aₑ | | | | | | |
| 755235 | 5-10-5 | ^{m}Cₑₛ Tₑₒ Gₑₒ Gₑₒ Aₑₒ T_{ds} T_{ds} ^{m}C_{ds} T_{ds} | 1090 | 1109 | 49264 | 49283 | 3234 | 3331 |
| | | G_{ds} T_{ds} A_{ds} ^{m}C_{ds} T_{ds} T_{ds} Tₑₒ Tₑₒ ^{m}Cₑₛ | | | | | | |
| | | Tₑₛ ^{m}Cₑ | | | | | | |
| 760771 | 5-8-5 | Tₑₛ Gₑₒ ^{m}Cₑₒ ^{m}Cₑₒ Tₑₛ ^{m}C_{ds} T_{ds} A_{ds} | 4274 | 4291 | 149025 | 149042 | 3292 | 3326 |
| | | ^{m}C_{ds} T_{ds} ^{m}C_{ds} G_{ds} G_{ds} Tₑₒ ^{m}Cₑₒ ^{m}Cₑₛ | | | | | | |
| | | AₑₛAₑ | | | | | | |
| 874430 | 5-10-5 | Gₑₛ Tₑₒ Tₑₒ Aₑₒ ^{m}Cₑₒ T_{ds} G_{ds} T_{ds} T_{ds} | N/A | N/A | N/A | N/A | 3293 | 3332 |
| | | T_{ds} ^{m}C_{ds} G_{ds} A_{ds} ^{m}C_{ds} ^{m}C_{ds} Tₑₒ ^{m}Cₑₒ | | | | | | |
| | | Gₑₛ Gₑₛ Aₑ | | | | | | |
| 1008800 | 5-8-5 | Tₑₛ Gₑₒ Tₑₒ Aₑₒ ^{m}Cₑₛ T_{ds} T_{ds} T_{ds} T_{ds} ^{m}C_{ds} | 1084 | 1101 | 49258 | 49275 | 3232 | 3327 |
| | | T_{ds} ^{m}C_{ds} A_{ds} Tₑₒ Gₑₒ Tₑₛ Gₑₛ ^{m}Cₑ | | | | | | |
| 1008806 | 5-8-5 | Gₑₛ Gₑₒ Aₑₒ Tₑₒ Tₑₛ ^{m}C_{ds} T_{ds} G_{ds} T_{ds} A_{ds} | 1090 | 1107 | 49264 | 49281 | 3233 | 3328 |
| | | ^{m}C_{ds} T_{ds} T_{ds} Tₑₒ Tₑₒ ^{m}Cₑₛ Tₑₛ ^{m}Cₑ | | | | | | |
| 1008845 | 4-10-6 | Tₑₛ Aₑₒ ^{m}Cₑₒ Tₑₒ T_{ds} T_{ds} T_{ds} ^{m}C_{ds} T_{ds} | 1080 | 1099 | 49254 | 49273 | 1637 | 3333 |
| | | ^{m}C_{ds} A_{ds} T_{ds} G_{ds} T_{ds} Gₑₒ ^{m}Cₑₒ Gₑₒ Gₑₛ | | | | | | |
| | | ^{m}Cₑₛ Aₑ | | | | | | |
| 1008852 | 4-10-6 | ^{m}Cₑₛ Tₑₒ Gₑₒ Gₑₒ A_{ds} T_{ds} T_{ds} ^{m}C_{ds} T_{ds} | 1090 | 1109 | 49264 | 49283 | 3234 | 3334 |
| | | G_{ds} T_{ds} A_{ds} ^{m}C_{ds} T_{ds} Tₑₒ Tₑₒ Tₑₒ ^{m}Cₑₛ | | | | | | |
| | | Tₑₛ ^{m}Cₑ | | | | | | |
| 1008854 | 4-10-6 | ^{m}Cₑₛ Tₑₒ Gₑₒ ^{m}Cₑₒ T_{ds} A_{ds} A_{ds} ^{m}C_{ds} T_{ds} | 1479 | 1498 | 81639 | 81658 | 1255 | 3348 |
| | | G_{ds} G_{ds} T_{ds} T_{ds} T_{ds} Gₑₒ ^{m}Cₑₒ ^{m}Cₑₒ ^{m}Cₑₛ | | | | | | |
| | | Tₑₛ Tₑ | | | | | | |
| 1008858 | 6-10-4 | ^{m}Cₑₛ Tₑₒ Tₑₒ Aₑₒ Gₑₒ Aₑₒ G_{ds} T_{ds} T_{ds} | N/A | N/A | 9931 | 9950 | 3087 | 3335 |
| | | T_{ds} T_{ds} T_{ds} G_{ds} ^{m}C_{ds} ^{m}C_{ds} T_{ds} Tₑₒ | | | | | | |
| | | ^{m}Cₑₛ ^{m}Cₑₛ Aₑ | | | | | | |
| 1008859 | 6-10-4 | Gₑₛ ^{m}Cₑₒ Tₑₒ Tₑₒ Aₑₒ Gₑₒ A_{ds} G_{ds} T_{ds} | N/A | N/A | 9932 | 9951 | 2177 | 3336 |
| | | T_{ds} T_{ds} T_{ds} T_{ds} G_{ds} ^{m}C_{ds} ^{m}C_{ds} Tₑₒ Tₑₛ | | | | | | |
| | | ^{m}Cₑₛ ^{m}Cₑ | | | | | | |
| 1008860 | 6-10-4 | Aₑₛ Gₑₒ ^{m}Cₑₒ Tₑₒ Tₑₒ Aₑₒ G_{ds} A_{ds} G_{ds} | N/A | N/A | 9933 | 9952 | 3164 | 3337 |
| | | T_{ds} T_{ds} T_{ds} T_{ds} T_{ds} G_{ds} ^{m}C_{ds} ^{m}Cₑₒ Tₑₛ | | | | | | |
| | | Tₑₛ ^{m}Cₑ | | | | | | |
| 1008861 | 6-10-4 | ^{m}Cₑₛ Gₑₒ Tₑₒ Aₑₒ Tₑₒ Gₑₒ T_{ds} T_{ds} T_{ds} | N/A | N/A | 33816 | 33835 | 2262 | 3338 |
| | | G_{ds} T_{ds} ^{m}C_{ds} T_{ds} G_{ds} T_{ds} ^{m}C_{ds} Tₑₒ Tₑₛ | | | | | | |
| | | Aₑₛ Tₑ | | | | | | |
| 1008862 | 6-10-4 | Tₑₛ Gₑₒ Tₑₒ Aₑₒ ^{m}Cₑₒ Tₑₒ T_{ds} ^{m}C_{ds} A_{ds} | 991 | 1010 | 48690 | 48709 | 1185 | 3322 |
| | | ^{m}C_{ds} A_{ds} T_{ds} T_{ds} T_{ds} G_{ds} G_{ds} Aₑₒ Gₑₛ | | | | | | |
| | | ^{m}Cₑₛ ^{m}Cₑ | | | | | | |
| 1008863 | 6-10-4 | Aₑₛ ^{m}Cₑₒ Tₑₒ Tₑₒ Tₑₒ Tₑₒ ^{m}C_{ds} T_{ds} | 1079 | 1098 | 49253 | 49272 | 1561 | 3339 |
| | | ^{m}C_{ds} A_{ds} T_{ds} G_{ds} T_{ds} G_{ds} ^{m}C_{ds} G_{ds} | | | | | | |
| | | Gₑₒ ^{m}Cₑₛ Aₑₛ Te | | | | | | |
| 1008864 | 6-10-4 | Tₑₛ Aₑₒ ^{m}Cₑₒ Tₑₒ Tₑₒ Tₑₒ T_{ds} ^{m}C_{ds} T_{ds} | 1080 | 1099 | 49254 | 49273 | 1637 | 3340 |
| | | ^{m}C_{ds} A_{ds} T_{ds} G_{ds} T_{ds} G_{ds} ^{m}C_{ds} Gₑₒ | | | | | | |
| | | Gₑₛ ^{m}Cₑₛ Aₑ | | | | | | |
| 1008865 | 6-10-4 | Tₑₛ ^{m}Cₑₒ Tₑₒ Gₑₒ Tₑₒ Aₑₒ ^{m}C_{ds} T_{ds} T_{ds} | 1084 | 1103 | 49258 | 49277 | 2544 | 3341 |
| | | T_{ds} T_{ds} ^{m}C_{ds} T_{ds} ^{m}C_{ds} A_{ds} T_{ds} Gₑₒ Tₑₛ | | | | | | |
| | | Gₑₛ ^{m}Cₑ | | | | | | |
| 1008866 | 6-10-4 | Tₑₛ Tₑₒ ^{m}Cₑₒ Tₑₒ ^{m}Cₑₒ Tₑₒ A_{ds} T_{ds} T_{ds} | 1649 | 1668 | 83260 | 83279 | 804 | 3342 |
| | | T_{ds} ^{m}C_{ds} T_{ds} T_{ds} T_{ds} G_{ds} T_{ds} ^{m}Cₑₒ | | | | | | |
| | | ^{m}Cₑₛ Aₑₛ Gₑ | | | | | | |
| 1008867 | 6-10-4 | Aₑₛ ^{m}Cₑₒ Aₑₒ ^{m}Cₑₒ Aₑₒ Gₑₒ T_{ds} T_{ds} | N/A | N/A | 57472 | 57491 | 2503 | 3343 |
| | | T_{ds} ^{m}C_{ds} A_{ds} ^{m}C_{ds} T_{ds} A_{ds} G_{ds} G_{ds} Tₑₒ | | | | | | |
| | | Tₑₛ ^{m}Cₑₛ Tₑ | | | | | | |
| 1008868 | 6-10-4 | Tₑₛ Gₑₒ Gₑₒ Tₑₒ Gₑₒ Gₑₒ T_{ds} G_{ds} T_{ds} | N/A | N/A | 9003 | 9022 | 1800 | 3344 |
| | | G_{ds} ^{m}C_{ds} G_{ds} ^{m}C_{ds} A_{ds} T_{ds} G_{ds} Tₑₒ | | | | | | |
| | | Aₑₛ Gₑₛ Aₑ | | | | | | |
| 1008869 | 6-10-4 | Gₑₛ Tₑₒ Tₑₒ Aₑₒ ^{m}Cₑₒ Tₑₒ G_{ds} T_{ds} T_{ds} | N/A | N/A | 45744 | 45763 | 3291 | 3345 |
| | | T_{ds} ^{m}C_{ds} G_{ds} A_{ds} ^{m}C_{ds} ^{m}C_{ds} T_{ds} ^{m}Cₑₒ | | | | | | |
| | | Tₑₛ Gₑₛ Aₑ | | | | | | |
| 1008870 | 6-10-4 | Tₑₛ Gₑₒ Gₑₒ Aₑₒ Tₑₒ Tₑₒ ^{m}C_{ds} T_{ds} G_{ds} | 1089 | 1108 | 49263 | 49282 | 3235 | 3330 |
| | | T_{ds} A_{ds} ^{m}C_{ds} T_{ds} T_{ds} T_{ds} T_{ds} ^{m}Cₑₒ Tₑₛ | | | | | | |
| | | ^{m}Cₑₛ Aₑ | | | | | | |
| 1008871 | 6-10-4 | ^{m}Cₑₛ Tₑₒ Gₑₒ Gₑₒ Aₑₒ Tₑₒ T_{ds} ^{m}C_{ds} T_{ds} | 1090 | 1109 | 49264 | 49283 | 3234 | 3346 |
| | | G_{ds} T_{ds} A_{ds} ^{m}C_{ds} T_{ds} T_{ds} T_{ds} Tₑₒ ^{m}Cₑₛ | | | | | | |
| | | Tₑₛ ^{m}Cₑ | | | | | | |
| 1008872 | 6-10-4 | ^{m}Cₑₛ Tₑₒ ^{m}Cₑₒ Tₑₒ ^{m}Cₑₒ ^{m}Cₑₒ A_{ds} T_{ds} | 1123 | 1142 | 49297 | 49316 | 33 | 3347 |
| | | T_{ds} A_{ds} T_{ds} T_{ds} T_{ds} ^{m}C_{ds} T_{ds} T_{ds} ^{m}Cₑₒ | | | | | | |
| | | Aₑₛ ^{m}Cₑₛ Gₑ | | | | | | |
| 1008873 | 6-10-4 | ^{m}Cₑₛ Tₑₒ Gₑₒ ^{m}Cₑₒ Tₑₒ Aₑₒ A_{ds} ^{m}C_{ds} | 1479 | 1498 | 81639 | 81658 | 1255 | 3348 |
| | | T_{ds} G_{ds} G_{ds} T_{ds} T_{ds} T_{ds} G_{ds} ^{m}C_{ds} ^{m}Cₑₒ | | | | | | |
| | | ^{m}Cₑₛ Tₑₛ Tₑ | | | | | | |
| 1008874 | 6-10-4 | ^{m}Cₑₛ ^{m}Cₑₒ Tₑₒ Aₑₒ Tₑₒ ^{m}Cₑₒ A_{ds} T_{ds} | 1538 | 1557 | 81698 | 81717 | 158 | 3324 |
| | | ^{m}C_{ds} A_{ds} T_{ds} T_{ds} T_{ds} T_{ds} ^{m}C_{ds} ^{m}C_{ds}Aₑₒ | | | | | | |
| | | Gₑₛ Gₑₛ Gₑ | | | | | | |
| 1008875 | 6-10-4 | Aₑₛ ^{m}Cₑₒ Tₑₒ Tₑₒ ^{m}Cₑₒ Tₑₒ ^{m}C_{ds} T_{ds} A_{ds} | 1651 | 1670 | 83262 | 83281 | 172 | 3349 |
| | | T_{ds} T_{ds} T_{ds} ^{m}C_{ds} T_{ds} T_{ds} T_{ds} Gₑₒ Tₑₛ | | | | | | |
| | | ^{m}Cₑₛ ^{m}Cₑ | | | | | | |
| 1008876 | 6-10-4 | Gₑₛ Tₑₒ Gₑₒ Aₑₒ Tₑₒ Gₑₒ T_{ds} T_{ds} T_{ds} | 2460 | 2479 | 91730 | 91749 | 1188 | 3350 |
| | | ^{m}C_{ds} A_{ds} T_{ds} T_{ds} G_{ds} G_{ds} G_{ds} Tₑₒ Tₑₛ | | | | | | |
| | | Tₑₛ Aₑ | | | | | | |
| 1008877 | 5-10-5 | Gₑₛ Tₑₒ Aₑₒ Tₑₒ Gₑₒ T_{ds} T_{ds} T_{ds} G_{ds} | N/A | N/A | 33815 | 33834 | 3294 | 3351 |
| | | T_{ds} ^{m}C_{ds} T_{ds} G_{ds} T_{ds} ^{m}C_{ds} Tₑₒ Tₑₒ Aₑₛ | | | | | | |
| | | Tₑₛ Tₑ | | | | | | |
| 1008878 | 5-10-5 | Tₑₛ ^{m}Cₑₒ Gₑₒ Tₑₒ Aₑₒ T_{ds} G_{ds} T_{ds} T_{ds} | N/A | N/A | 33817 | 33836 | 3295 | 3352 |
| | | T_{ds} G_{ds} T_{ds} ^{m}C_{ds} T_{ds} G_{ds} Tₑₒ ^{m}Cₑₒ Tₑₛ | | | | | | |
| | | Tₑₛ Aₑ | | | | | | |
| 1008879 | 5-10-5 | Aₑₛ ^{m}Cₑₒ Tₑₒ Tₑₒ ^{m}Cₑₒ A_{ds} ^{m}C_{ds} A_{ds} | N/A | N/A | 48687 | 48706 | 3296 | 3353 |
| | | T_{ds} T_{ds} T_{ds} G_{ds} G_{ds} A_{ds} G_{ds} ^{m}Cₑₒ ^{m}Cₑₒ | | | | | | |
| | | ^{m}Cₑₛ Tₑₛ Aₑ | | | | | | |
| 1008880 | 5-10-5 | Tₑₛ Aₑₒ ^{m}Cₑₒ Tₑₒ Tₑₒ ^{m}C_{ds} A_{ds} ^{m}C_{ds} | N/A | N/A | 48688 | 48707 | 3297 | 3354 |
| | | A_{ds} T_{ds} T_{ds} T_{ds} G_{ds} G_{ds} A_{ds} Gₑₒ ^{m}Cₑₒ | | | | | | |
| | | ^{m}Cₑₛ ^{m}Cₑₛ Tₑ | | | | | | |
| 1008881 | 5-10-5 | Gₑₛ Tₑₒ Aₑₒ ^{m}Cₑₒ Tₑₒ T_{ds} ^{m}C_{ds} A_{ds} ^{m}C_{ds} | N/A | N/A | 48689 | 48708 | 3236 | 3355 |
| | | A_{ds} T_{ds} T_{ds} T_{ds} G_{ds} G_{ds} Aₑₒ Gₑₒ ^{m}Cₑₛ | | | | | | |
| | | ^{m}Cₑₛ ^{m}Cₑ | | | | | | |
| 1008882 | 5-10-5 | Aₑₛ Tₑₒ Tₑₒ ^{m}Cₑₒ Tₑₒ G_{ds} T_{ds} A_{ds} ^{m}C_{ds} | 1086 | 1105 | 49260 | 49279 | 3298 | 3356 |
| | | T_{ds} T_{ds} T_{ds} T_{ds} ^{m}C_{ds} T_{ds} ^{m}Cₑₒ Aₑₒ Tₑₛ | | | | | | |
| | | Gₑₛ Tₑ | | | | | | |
| 1008883 | 5-10-5 | Gₑₛ Tₑₒ Tₑₒ Aₑₒ ^{m}Cₑₒ T_{ds} G_{ds} T_{ds} T_{ds} | N/A | N/A | 45744 | 45763 | 3291 | 3357 |
| | | T_{ds} ^{m}C_{ds} G_{ds} A_{ds} ^{m}C_{ds} ^{m}C_{ds} Tₑₒ ^{m}Cₑₒ | | | | | | |
| | | Tₑₛ Gₑₛ Aₑ | | | | | | |
| 1008884 | 5-10-5 | Aₑₛ ^{m}Cₑₒ Tₑₒ Gₑₒ Gₑₒ A_{ds} T_{ds} T_{ds} ^{m}C_{ds} | 1091 | 1110 | 49265 | 49284 | 3237 | 3358 |
| | | T_{ds} G_{ds} T_{ds} A_{ds} ^{m}C_{ds} T_{ds} Tₑₒ Tₑₒ Tₑₛ | | | | | | |
| | | ^{m}Cₑₛ Tₑ | | | | | | |
| 1008885 | 5-10-5 | Aₑₛ Aₑₒ ^{m}Cₑₒ Tₑₒ Gₑₒ G_{ds} A_{ds} T_{ds} T_{ds} | 1092 | 1111 | 49266 | 49285 | 3299 | 3359 |
| | | ^{m}C_{ds} T_{ds} G_{ds} T_{ds} A_{ds} ^{m}C_{ds} Tₑₒ Tₑₒ Tₑₛ | | | | | | |
| | | Tₑₛ ^{m}Cₑ | | | | | | |
| 1008886 | 5-10-5 | Gₑₛ Aₑₒ Aₑₒ ^{m}Cₑₒ Tₑₒ G_{ds} G_{ds} A_{ds} T_{ds} | 1093 | 1112 | 49267 | 49286 | 3300 | 3360 |
| | | T_{ds} ^{m}C_{ds} T_{ds} G_{ds} T_{ds} A_{ds} ^{m}Cₑₒ Tₑₒ Tₑₛ | | | | | | |
| | | Tₑₛ Tₑ | | | | | | |
| 1008887 | 5-10-5 | Tₑₛ ^{m}Cₑₒ ^{m}Cₑₒ Aₑₒ Tₑₒ T_{ds} A_{ds} T_{ds} T_{ds} | 1120 | 1139 | 49294 | 49313 | 3301 | 3361 |
| | | T_{ds} ^{m}C_{ds} T_{ds} T_{ds} ^{m}C_{ds} A_{ds} ^{m}Cₑₒ Gₑₒ | | | | | | |
| | | Tₑₛ Tₑₛ Tₑ | | | | | | |
| 1008888 | 5-10-5 | ^{m}Cₑₛ Tₑₒ ^{m}Cₑₒ ^{m}Cₑₒ Aₑₒ T_{ds} T_{ds} A_{ds} T_{ds} | 1121 | 1140 | 49295 | 49314 | 3238 | 3362 |
| | | T_{ds} T_{ds} ^{m}C_{ds} T_{ds} T_{ds} ^{m}C_{ds} Aₑₒ ^{m}Cₑₒ Gₑₛ | | | | | | |
| | | Tₑₛ Tₑ | | | | | | |
| 1008889 | 5-10-5 | Tₑₛ ^{m}Cₑₒ Tₑₒ ^{m}Cₑₒ ^{m}Cₑₒ A_{ds} T_{ds} T_{ds} A_{ds} | 1122 | 1141 | 49296 | 49315 | 3239 | 3363 |
| | | T_{ds} T_{ds} T_{ds} ^{m}C_{ds} T_{ds} T_{ds} ^{m}Cₑₒ Aₑₒ ^{m}Cₑₛ | | | | | | |
| | | Gₑₛ Tₑ | | | | | | |
| 1008890 | 5-10-5 | ^{m}Cₑₛ Tₑₒ ^{m}Cₑₒ Tₑₒ Aₑₒ T_{ds} T_{ds} T_{ds} | 1647 | 1666 | 83258 | 83277 | 3302 | 3364 |
| | | ^{m}C_{ds} T_{ds} T_{ds} T_{ds} G_{ds} T_{ds} ^{m}C_{ds} ^{m}Cₑₒ | | | | | | |
| | | Aₑₒ Gₑₛ Gₑₛ Aₑ | | | | | | |
| 1008891 | 5-10-5 | Gₑₛ Tₑₒ Gₑₒ Gₑₒ Tₑₒ G_{ds} T_{ds} G_{ds} ^{m}C_{ds} | N/A | N/A | 9001 | 9020 | 3303 | 3365 |
| | | G_{ds} ^{m}C_{ds} A_{ds} T_{ds} G_{ds} T_{ds} Aₑₒ Gₑₒ Aₑₛ | | | | | | |
| | | ^{m}Cₑₛ ^{m}Cₑ | | | | | | |
| 1008892 | 5-10-5 | Gₑₛ Gₑₒ Tₑₒ Gₑₒ Gₑₒ T_{ds} G_{ds} T_{ds} G_{ds} | N/A | N/A | 9002 | 9021 | 3304 | 3366 |
| | | ^{m}C_{ds} G_{ds} ^{m}C_{ds} A_{ds} T_{ds} G_{ds} Tₑₒ Aₑₒ | | | | | | |
| | | Gₑₛ Aₑₛ ^{m}Cₑ | | | | | | |
| 1008893 | 5-10-5 | Gₑₛ Tₑₒ Gₑₒ Gₑₒ Tₑₒ G_{ds} G_{ds} T_{ds} G_{ds} | N/A | N/A | 9004 | 9023 | 3305 | 3367 |
| | | T_{ds} G_{ds} ^{m}C_{ds} G_{ds} ^{m}C_{ds} A_{ds} Tₑₒ Gₑₒ Tₑₛ | | | | | | |
| | | Aₑₛ Gₑ | | | | | | |
| 1008894 | 5-10-5 | ^{m}Cₑₛ Gₑₒ Tₑₒ Gₑₒ Gₑₒ T_{ds} G_{ds} G_{ds} T_{ds} | N/A | N/A | 9005 | 9024 | 3306 | 3368 |
| | | G_{ds} T_{ds} G_{ds} ^{m}C_{ds} G_{ds} ^{m}C_{ds} Aₑₒ Tₑₒ | | | | | | |
| | | Gₑₛ Tₑₛ Aₑ | | | | | | |
| 1008895 | 5-10-5 | Aₑₛ Gₑₒ Tₑₒ Tₑₒ ^{m}Cₑₒ A_{ds} ^{m}C_{ds} ^{m}C_{ds} | 1279 | 1298 | 76416 | 76435 | 3307 | 3369 |
| | | T_{ds} G_{ds} ^{m}C_{ds} A_{ds} T_{ds} ^{m}C_{ds} ^{m}C_{ds} ^{m}Cₑₒ | | | | | | |
| | | Aₑₒ Gₑₛ Gₑₛ Gₑ | | | | | | |
| 1008896 | 5-10-5 | Gₑₛ Aₑₒ Gₑₒ Tₑₒ Tₑₒ ^{m}C_{ds} A_{ds} ^{m}C_{ds} | 1280 | 1299 | 76417 | 76436 | 3308 | 3370 |
| | | ^{m}C_{ds} T_{ds} G_{ds} ^{m}C_{ds} A_{ds} T_{ds} ^{m}C_{ds} ^{m}Cₑₒ | | | | | | |
| | | ^{m}Cₑₒ Aₑₛ Gₑₛ Gₑ | | | | | | |
| 1008897 | 5-10-5 | Tₑₛ Gₑₒ Aₑₒ Gₑₒ Tₑₒ T_{ds} ^{m}C_{ds} A_{ds} | 1281 | 1300 | 76418 | 76437 | 3309 | 3371 |
| | | ^{m}C_{ds} ^{m}C_{ds} T_{ds} G_{ds} ^{m}C_{ds} A_{ds} T_{ds} ^{m}Cₑₒ | | | | | | |
| | | ^{m}Cₑₒ ^{m}Cₑₛ Aₑₛ Gₑ | | | | | | |
| 1008898 | 5-10-5 | Tₑₛ Gₑₒ Tₑₒ Gₑₒ Aₑₒ G_{ds} T_{ds} T_{ds} ^{m}C_{ds} | 1283 | 1302 | 76420 | 76439 | 3310 | 3372 |
| | | A_{ds} ^{m}C_{ds} ^{m}C_{ds} T_{ds} G_{ds} ^{m}C_{ds} Aₑₒ Tₑₒ | | | | | | |
| | | ^{m}Cₑₛ ^{m}Cₑₛ ^{m}Cₑ | | | | | | |
| 1008899 | 5-10-5 | ^{m}Cₑₛ Tₑₒ Gₑₒ Tₑₒ Gₑₒ A_{ds} G_{ds} T_{ds} T_{ds} | 1284 | 1303 | 76421 | 76440 | 3311 | 3373 |
| | | ^{m}C_{ds} A_{ds} ^{m}C_{ds} ^{m}C_{ds} T_{ds} G_{ds} ^{m}Cₑₒ Aₑₒ | | | | | | |
| | | Tₑₛ ^{m}Cₑₛ ^{m}Cₑ | | | | | | |
| 1008900 | 5-10-5 | Gₑₛ ^{m}Cₑₒ Tₑₒ Gₑₒ Tₑₒ G_{ds} A_{ds} G_{ds} T_{ds} | 1285 | 1304 | 76422 | 76441 | 3312 | 3374 |
| | | T_{ds} ^{m}C_{ds} A_{ds} ^{m}C_{ds} ^{m}C_{ds} T_{ds} Gₑₒ ^{m}Cₑₒ | | | | | | |
| | | Aₑₛ Tₑₛ ^{m}Cₑ | | | | | | |
| 1008901 | 5-10-5 | Gₑₛ ^{m}Cₑₒ Gₑₒ Gₑₒ Tₑₒ G_{ds} A_{ds} A_{ds} T_{ds} | 1686 | 1705 | 83297 | 83316 | 3313 | 3375 |
| | | T_{ds} ^{m}C_{ds} T_{ds} G_{ds} T_{ds} ^{m}C_{ds} Tₑₒ ^{m}Cₑₒ | | | | | | |
| | | ^{m}Cₑₛ ^{m}Cₑₛ Aₑ | | | | | | |
| 1008902 | 5-10-5 | Tₑₛ Aₑₒ ^{m}Cₑₒ Gₑₒ ^{m}Cₑₒ G_{ds} G_{ds} T_{ds} | 1689 | 1708 | 83300 | 83319 | 3314 | 3376 |
| | | G_{ds} A_{ds} A_{ds} T_{ds} T_{ds} ^{m}C_{ds} T_{ds} Gₑₒ Tₑₒ | | | | | | |
| | | ^{m}Cₑₛ Tₑₛ ^{m}Cₑ | | | | | | |
| 1008903 | 5-10-5 | ^{m}Cₑₛ Aₑₒ Tₑₒ Aₑₒ ^{m}Cₑₒ G_{ds} ^{m}C_{ds} G_{ds} | 1691 | 1710 | 83302 | 83321 | 3315 | 3377 |
| | | G_{ds} T_{ds} G_{ds} A_{ds} A_{ds} T_{ds} T_{ds} ^{m}Cₑₒ Tₑₒ | | | | | | |
| | | Gₑₛ Tₑₛ ^{m}Cₑ | | | | | | |
| 1008904 | 5-10-5 | Aₑₛ ^{m}Cₑₒ Tₑₒ Gₑₒ Tₑₒ T_{ds} T_{ds} ^{m}C_{ds} G_{ds} | N/A | N/A | 45741 | 45760 | 3316 | 3378 |
| | | A_{ds} ^{m}C_{ds} ^{m}C_{ds} T_{ds} ^{m}C_{ds} T_{ds} Gₑₒ Aₑₒ | | | | | | |
| | | Aₑₛ Aₑₛ Aₑ | | | | | | |
| 1008905 | 5-10-5 | Tₑₛ Aₑₒ ^{m}Cₑₒ Tₑₒ Gₑₒ T_{ds} T_{ds} T_{ds} ^{m}C_{ds} | N/A | N/A | 45742 | 45761 | 3317 | 3379 |
| | | G_{ds} A_{ds} ^{m}C_{ds} ^{m}C_{ds} T_{ds} ^{m}C_{ds} Tₑₒ Gₑₒ | | | | | | |
| | | Aₑₛ Aₑₛ Aₑ | | | | | | |
| 1008906 | 5-10-5 | Tₑₛ Tₑₒ Aₑₒ ^{m}Cₑₒ Tₑₒ G_{ds} T_{ds} T_{ds} T_{ds} | N/A | N/A | 45743 | 45762 | 3318 | 3380 |
| | | ^{m}C_{ds} G_{ds} A_{ds} ^{m}C_{ds} ^{m}C_{ds} T_{ds} ^{m}Cₑₒ Tₑₒ | | | | | | |
| | | Gₑₛ Aₑₛ Aₑ | | | | | | |
| 1008907 | 5-10-5 | Tₑₛ Gₑₒ Tₑₒ Tₑₒ Aₑₒ ^{m}C_{ds} T_{ds} G_{ds} T_{ds} | 891 | 910 | 45745 | 45764 | 3319 | 3381 |
| | | T_{ds} T_{ds} ^{m}C_{ds} G_{ds} A_{ds} ^{m}C_{ds} ^{m}Cₑₒ Tₑₒ | | | | | | |
| | | ^{m}Cₑₛ Tₑₛ Gₑ | | | | | | |
| 1008908 | 5-10-5 | Tₑₛ Gₑₒ Tₑₒ Aₑₒ ^{m}Cₑₛ T_{ds} T_{ds} ^{m}C_{ds} A_{ds} | 991 | 1010 | 48690 | 48709 | 1185 | 3382 |
| | | ^{m}C_{ds} A_{ds} T_{ds} T_{ds} T_{ds} G_{ds} Gₑₒ Aₑₒ Gₑₛ | | | | | | |
| | | ^{m}Cₑₛ ^{m}Cₑ | | | | | | |
| 1008909 | 5-10-5 | Tₑₛ Gₑₒ Tₑₒ Aₑₛ ^{m}Cₑₛ T_{ds} T_{ds} ^{m}C_{ds} A_{ds} | 991 | 1010 | 48690 | 48709 | 1185 | 3383 |
| | | ^{m}C_{ds} A_{ds} T_{ds} T_{ds} T_{ds} G_{ds} Gₑₒ Aₑₒ Gₑₛ | | | | | | |
| | | ^{m}Cₑₛ ^{m}Cₑ | | | | | | |
| 1008910 | 5-10-5 | Tₑₛ ^{m}Cₑₒ Tₑₒ Gₑₒ Tₑₛ A_{ds} ^{m}C_{ds} T_{ds} T_{ds} | 1084 | 1103 | 49258 | 49277 | 2544 | 3325 |
| | | T_{ds} T_{ds} ^{m}C_{ds} T_{ds} ^{m}C_{ds} A_{ds} Tₑₒ Gₑₒ Tₑₛ | | | | | | |
| | | Gₑₛ ^{m}Cₑ | | | | | | |
| 1008911 | 5-10-5 | Tₑₛ ^{m}Cₑₒ Tₑₒ Gₑₛ Tₑₛ A_{ds} ^{m}C_{ds} T_{ds} T_{ds} | 1084 | 1103 | 49258 | 49277 | 2544 | 3384 |
| | | T_{ds} T_{ds} ^{m}C_{ds} T_{ds} ^{m}C_{ds} A_{ds} Tₑₒ Gₑₒ Tₑₛ | | | | | | |
| | | Gₑₛ ^{m}Cₑ | | | | | | |
| 1008912 | 5-10-5 | ^{m}Cₑₛ Aₑₒ ^{m}Cₑₒ Aₑₒ Gₑₛ T_{ds} T_{ds} T_{ds} | N/A | N/A | 57471 | 57490 | 2121 | 3385 |
| | | ^{m}C_{ds} A_{ds} ^{m}C_{ds} T_{ds} A_{ds} G_{ds} G_{ds} Tₑₒ Tₑₒ | | | | | | |
| | | ^{m}Cₑₛ Tₑₛ ^{m}Cₑ | | | | | | |
| 1008913 | 5-10-5 | ^{m}Cₑₛ Aₑₒ ^{m}Cₑₒ Aₑₛ Gₑₛ T_{ds} T_{ds} T_{ds} | N/A | N/A | 57471 | 57490 | 2121 | 3386 |
| | | ^{m}C_{ds} A_{ds} ^{m}C_{ds} T_{ds} A_{ds} G_{ds} G_{ds} Tₑₒ Tₑₒ | | | | | | |
| | | ^{m}Cₑₛ Tₑₛ ^{m}Cₑ | | | | | | |
| 1008914 | 5-10-5 | Aₑₛ ^{m}Cₑₒ Aₑₒ ^{m}Cₑₒ Aₑₛ G_{ds} T_{ds} T_{ds} T_{ds} | N/A | N/A | 57472 | 57491 | 2503 | 3387 |
| | | ^{m}C_{ds} A_{ds} ^{m}C_{ds} T_{ds} A_{ds} G_{ds} Gₑₒ Tₑₒ Tₑₛ | | | | | | |
| | | ^{m}Cₑₛ Tₑ | | | | | | |
| 1008915 | 5-10-5 | Aₑₛ ^{m}Cₑₒ Aₑₒ ^{m}Cₑₛ Aₑₛ G_{ds} T_{ds} T_{ds} T_{ds} | N/A | N/A | 57472 | 57491 | 2503 | 3388 |
| | | ^{m}C_{ds} A_{ds} ^{m}C_{ds} T_{ds} A_{ds} G_{ds} Gₑₒ Tₑₒ Tₑₛ | | | | | | |
| | | ^{m}Cₑₛ Tₑ | | | | | | |
| 1008916 | 5-10-5 | Tₑₛ Tₑₒ ^{m}Cₑₒ Tₑₒ ^{m}Cₑₛ T_{ds} A_{ds} T_{ds} T_{ds} | 1649 | 1668 | 83260 | 83279 | 804 | 3389 |
| | | T_{ds} ^{m}C_{ds} T_{ds} T_{ds} T_{ds} G_{ds} Tₑₒ ^{m}Cₑₒ | | | | | | |
| | | ^{m}Cₑₛ Aₑₛ Gₑ | | | | | | |
| 1008917 | 5-10-5 | Tₑₛ Tₑₒ ^{m}Cₑₒ Tₑₛ ^{m}Cₑₛ T_{ds} A_{ds} T_{ds} T_{ds} | 1649 | 1668 | 83260 | 83279 | 804 | 3390 |
| | | T_{ds} ^{m}C_{ds} T_{ds} T_{ds} T_{ds} G_{ds} Tₑₒ ^{m}Cₑₒ | | | | | | |
| | | ^{m}Cₑₛ Aₑₛ Gₑ | | | | | | |

### Example 38: Effect of MOE Gapmers with Mixed Internucleoside Linkages on Human ATXN2 In Vitro, Multiple Doses

[0515] Modified oligonucleotides selected from the examples above were tested at various doses in A431 cells. Cells were plated at a density of 11,000 cells per well and transfected by free uptake with 0.023, 0.094, 0.375, 1.500 or 6.000 μM concentrations of modified oligonucleotide, as specified in the tables below. After a treatment period of approximately 48 hours, total RNA was isolated from the cells and ATXN2 RNA levels were measured by quantitative real-time PCR. Human ATXN2 primer probe set RTS5051 (forward sequence TCCAGTAGCAAGGACCAGT, designated herein as SEQ ID NO: 16; reverse sequence CAATACTGTTCTGTCTGGGAGA, designated herein as SEQ ID NO: 17; probe sequence ACTGACCACTGATGACCACGTTCC, designated herein as SEQ ID: 18) was used to measure RNA levels. ATXN2 RNA levels were adjusted according to total RNA cortent, as measured by RIBOGREEN®. Results are presented in the tables below as percent ATXN2 RNA expression relative to untreated control cells. As illustrated in the tables below, ATXN2 RNA levels were reduced in a dose-dependent manner in modified oligonucleotide-treated cells. IC₅₀ was calculated using the “log(inhibitor) vs. response—variable slope (4 parameters)” formula u sing Prism6 software.

TABLE 63
Dose-dependent reduction of human ATXN2 RNA expression in A431 cells

| | ATXN2 expression (% control) | | | | | |
|---|---|---|---|---|---|---|
| Compound | 0.023 | 0.094 | 0.375 | 1.500 | 6.000 | IC₅₀ |
| Number | μM | μM | μM | μM | μM | (μM) |
| 756993 | 88 | 83 | 59 | 37 | 22 | 0.8 |
| 874218 | 99 | 83 | 56 | 37 | 22 | 0.7 |
| 1008800 | 99 | 86 | 57 | 34 | 22 | 0.7 |
| 1008806 | 90 | 84 | 67 | 41 | 32 | 1.2 |
| 1008845 | 94 | 74 | 54 | 32 | 24 | 0.6 |
| 1008852 | 90 | 70 | 39 | 19 | 10 | 0.3 |
| 1008854 | 97 | 83 | 71 | 54 | 43 | 2.7 |
| 1008862 | 105 | 82 | 79 | 40 | 29 | 1.3 |
| 1008865 | 95 | 56 | 36 | 17 | 8 | 0.2 |
| 1008870 | 95 | 73 | 46 | 24 | 14 | 0.4 |
| 1008871 | 95 | 83 | 63 | 40 | 26 | 0.9 |
| 1008872 | 90 | 78 | 69 | 49 | 36 | 1.6 |
| 1008874 | 94 | 78 | 54 | 36 | 26 | 0.7 |
| 1008875 | 83 | 69 | 40 | 24 | 13 | 0.3 |
| 1008881 | 91 | 71 | 61 | 57 | 43 | 2.4 |
| 1008884 | 86 | 116 | 40 | 22 | 14 | 0.3 |
| 1008888 | 84 | 62 | 39 | 20 | 12 | 0.2 |
| 1008889 | 84 | 60 | 31 | 18 | 10 | 0.2 |
| 1008910 | 90 | 77 | 49 | 23 | 14 | 0.4 |

### Example 9: Effect of Modified Oligonucleotides on Human ATXN2 In Vitro, Multiple Doses

[0516] Modified oligonucleotides selected from the examples above were tested at various doses in SH-SY5Y cells. Cells were plated at a density of 35,000 cells per well and transfected by free uptake with 0.023, 0.094, 0.375, 1.500, or 6.000 μM concentrations of modified oligonucleotide, as specified in the tables below. After a treatment period of approximately 24 hours, total RNA was isolated from the cells and ATXN2 RNA levels were measured by quantitative real-time PCR. Human ATXN2 primer probe set RTS5051 (described herein in Example 8) was used to measure RNA Levels. ATXN2 RNA Levels were adjusted according to total RNA content, as measured by RIBOGREEN®. Results are presented in the tables below as percent ATXN2 RNA relative to untreated control. As illustrated in the tables below, ATXN2 RNA Levels were reduced in a dose-dependent manner in modified oligonucleotide-treated cells. IC₅₀ was calculated using the “log(inhibitor) vs. response—variable slope (4 parameters)” formula u sing Prism6 software.

TABLE 64
Dose-dependent reduction of human ATXN2
RNA expression in SH-SY5Y cells

| | ATXN2 expression (% control) | | | | | |
|---|---|---|---|---|---|---|
| Compound | 0.023 | 0.094 | 0.375 | 1.500 | 6.000 | IC₅₀ |
| Number | μM | μM | μM | μM | μM | (μM) |
| 756993 | 131 | 98 | 73 | 37 | 15 | 1.0 |
| 874218 | 111 | 89 | 62 | 26 | 15 | 0.7 |
| 1008800 | 96 | 89 | 64 | 45 | 19 | 1.0 |
| 1008806 | 102 | 99 | 74 | 55 | 34 | 2.1 |
| 1008854 | 90 | 86 | 75 | 56 | 31 | 1.9 |
| 1008862 | 114 | 107 | 78 | 50 | 21 | 1.5 |

TABLE 65
Dose-dependent reduction of human ATXN2
RNA expression in SH-SY5Y cells

| | ATXN2 expression (% control) | | | | | |
|---|---|---|---|---|---|---|
| Compound | 0.023 | 0.094 | 0.375 | 1.500 | 6.000 | IC₅₀ |
| Number | μM | μM | μM | μM | μM | (μM) |
| 1008865 | 108 | 97 | 74 | 35 | 16 | 1.0 |
| 1008870 | 109 | 99 | 90 | 52 | 24 | 1.7 |
| 1008874 | 98 | 90 | 75 | 42 | 27 | 1.3 |
| 1008888 | 100 | 95 | 72 | 43 | 30 | 1.4 |
| 1008889 | 91 | 86 | 58 | 36 | 15 | 0.7 |
| 1008910 | 106 | 106 | 85 | 50 | 23 | 1.6 |

### Example 10: Effect of Modified Oligonucleotides on Rhesus Monkey ATXN2 RNA Expression In Vitro, Multiple Doses

[0517] Modified oligonucleotides selected from the examples above, which are also complementary to rhesus monkey ATXN2, were tested at various doses in LLC-MK2 monkey cells. Cells were plated at density of 20,000 cells per well and transfected by free uptake with 0.023, 0.094, 0.375, 1.500, or 6.000 μM concentrations of modified oligonucleotide, as specified in the tables below. After a treatment period of approximately 24 hours, total RNA was isolated from the cells and ATXN2 RNA levels were measured by quantitative real-time PCR. Human ATXN2 primer probe set RTS5051 (described herein in Example 8) was used to measure RNA levels. ATXN2 RNA levels were adjusted according to total RNA content, as measured by RIBOGREEN®. Results are presented in the tables below as percent ATXN2 RNA expression relative to untreated control cells. As illustrated in the tables below, ATXN2 RNA Levels were reduced in a dose-dependent manner in modified oligonucleotide-treated cells. IC₅₀ was calculated using the “log(inhibitor) vs. response—variable slope (4 parameters)” formula u sing Prism6 software.

TABLE 66
Dose-dependent reduction of human ATXN2 RNA
expression in LLC-MK2 rhesus monkey cells

| | ATXN2 expression (% control) | | | | | |
|---|---|---|---|---|---|---|
| Compound | 0.023 | 0.094 | 0.375 | 1.500 | 6.000 | IC₅₀ |
| Number | μM | μM | μM | μM | μM | (μM) |
| 756993* | 140 | 124 | 107 | 69 | 26 | 2.8 |
| 874218* | 114 | 97 | 83 | 50 | 21 | 1.5 |
| 1008800 | 106 | 108 | 85 | 57 | 31 | 2.2 |
| 1008806 | 102 | 103 | 97 | 84 | 50 | 7.3 |
| 1008854 | 87 | 88 | 78 | 59 | 34 | 2.3 |
| 1008862 | 97 | 99 | 87 | 58 | 29 | 2.2 |

*Oligos contain one mismatch to rhesus monkey

TABLE 67
Dose-dependent reduction of human ATXN2 RNA
expression in LLC-MK2 rhesus monkey cells

| | ATXN2 expression (% control) | | | | | |
|---|---|---|---|---|---|---|
| Compound | 0.023 | 0.094 | 0.375 | 1.500 | 6.000 | IC₅₀ |
| Number | μM | μM | μM | μM | μM | (μM) |
| 1008865 | 114 | 105 | 101 | 56 | 22 | 2.1 |
| 1008870 | 107 | 87 | 76 | 58 | 26 | 1.7 |
| 1008874 | 90 | 82 | 66 | 39 | 18 | 0.7 |
| 1008888 | 91 | 85 | 82 | 53 | 24 | 1.7 |
| 1008889 | 75 | 78 | 68 | 36 | 15 | 0.9 |
| 1008910 | 86 | 94 | 79 | 72 | 31 | 2.7 |

### Example 11: Design of 541-5 MOE Gapmers with Mixed Internucleoside Linkages Complementary to Human ATIXN2 RNA

[0518] Modified oligonucleotides complementary to a human ATXN2 nucleic acid were designed. The modified oligonucleotides in the table below are 5-8-5 MOE gapmers. The gapmers are 18 nucleobases in length, wherein the central gap segment comprises eight 2′-deoxynucleosides and is flanked by wing segments on both the 5′ end and on the 3′ end comprising five 2′-MOE nucleosides. The sugar motif for the gapmers is (from 5′ to 3′): eeeeeddddddddddeeeee; wherein ‘d’ represents a 2′-deoxyribose sugar and ‘e’ represents a 2′-MOE modified sugar. The internucleoside linkages are mixed phosphodiester and phosphorothioate linkages. The internucleoside linkage motif for the gapmers is (from 5′ to 3′): sooosssssssssooss; wherein ‘o’ represents a phosphodiester internucleoside linkage and ‘s’ represents a phosphothioate internucleoside linkage. Each cytosine residue is a 5-methyl cytosine. “Start Site” indicates the 5′-most nucleoside to which the gapmer is complementary in the human nucleic acid sequence. “Stop Site” indicates the 3′-most nucleoside to which the gapmer is complementary in the human nucleic acid sequence.

[0519] Each modified oligonucleotide listed in the table below is complementary to human ATXN2 nucleic acid sequence SEQ ID NO: 1 or SEQ ID NO: 2, as indicated. ‘N/A’ indicates that the modified oligonucleotide is not complementary to that particular nucleic acid with 100% complementarity.

TABLE 68
5-8-5 MOE gapmers with mixed internucleoside linkages
complementary to human ATXN2 RNA

| | | SEQ ID | | SEQ ID | SEQ ID | |
|---|---|---|---|---|---|---|
| | | NO: 1 | SEQ ID | NO: 2 | NO: 2 | |
| Compound | Sequence | Start | NO: 1 | Start | Stop | SEQ ID |
| Number | (5′ to 3′) | Site | Stop Site | Site | Site | NO: |
| 1008786 | TTAGAGTTTTTGCCTTCC | N/A | N/A | 9932 | 9949 | 3240 |
| 1008787 | CTTAGAGTTTTTGCCTTC | N/A | N/A | 9933 | 9950 | 3241 |
| 1008788 | GCTTAGAGTTTTTGCCTT | N/A | N/A | 9934 | 9951 | 3242 |
| 1008789 | TATGTTTGTCTGTCTTAT | N/A | N/A | 33816 | 33833 | 3243 |
| 1008790 | GTATGTTTGTCTGTCTTA | N/A | N/A | 33817 | 33834 | 3244 |
| 1008791 | CGTATGTTTGTCTGTCTT | N/A | N/A | 33818 | 33835 | 3245 |
| 1008792 | TACTTCACATTTGGAGCC | 991 | 1008 | 48690 | 48707 | 3246 |
| 1008793 | GTACTTCACATTTGGAGC | 992 | 1009 | 48691 | 48708 | 3247 |
| 1008794 | TGTACTTCACATTTGGAG | 993 | 1010 | 48692 | 48709 | 3248 |
| 1008795 | TTTTCTCATGTGCGGCAT | 1079 | 1096 | 49253 | 49270 | 3249 |
| 1008796 | CTTTTCTCATGTGCGGCA | 1080 | 1097 | 49254 | 49271 | 3250 |
| 1008797 | ACTTTTCTCATGTGCGGC | 1081 | 1098 | 49255 | 49272 | 3251 |
| 1008798 | TACTTTTCTCATGTGCGG | 1082 | 1099 | 49256 | 49273 | 3252 |
| 1008799 | GTACTTTTCTCATGTGCG | 1083 | 1100 | 49257 | 49274 | 3253 |
| 1008801 | CTGTACTTTTCTCATGTG | 1085 | 1102 | 49259 | 49276 | 3254 |
| 1008802 | TCTGTACTTTTCTCATGT | 1086 | 1103 | 49260 | 49277 | 3255 |
| 1008803 | TTCTGTACTTTTCTCATG | 1087 | 1104 | 49261 | 49278 | 3256 |
| 1008804 | ATTCTGTACTTTTCTCAT | 1088 | 1105 | 49262 | 49279 | 3257 |
| 1008805 | GATTCTGTACTTTTCTCA | 1089 | 1106 | 49263 | 49280 | 3258 |
| 1008807 | TGGATTCTGTACTTTTCT | 1091 | 1108 | 49265 | 49282 | 3259 |
| 1008808 | CTGGATTCTGTACTTTTC | 1092 | 1109 | 49266 | 49283 | 3260 |
| 1008809 | CTCCATTATTTCTTCACG | 1123 | 1140 | 49297 | 49314 | 3261 |
| 1008810 | TCTCCATTATTTCTTCAC | 1124 | 1141 | 49298 | 49315 | 3262 |
| 1008811 | CTCTCCATTATTTCTTCA | 1125 | 1142 | 49299 | 49316 | 3263 |
| 1008812 | TAACTGGTTTGCCCTTGC | 1477 | 1494 | 81637 | 81654 | 3264 |
| 1008813 | CTAACTGGTTTGCCCTTG | 1478 | 1495 | 81638 | 81655 | 3265 |
| 1008814 | GCTAACTGGTTTGCCCTT | 1479 | 1496 | 81639 | 81656 | 3266 |
| 1008815 | TGCTAACTGGTTTGCCCT | 1480 | 1497 | 81640 | 81657 | 3267 |
| 1008816 | CTGCTAACTGGTTTGCCC | 1481 | 1498 | 81641 | 81658 | 3268 |
| 1008817 | TCTGCTAACTGGTTTGCC | 1482 | 1499 | 81642 | 81659 | 3269 |
| 1008818 | TTCTGCTAACTGGTTTGC | 1483 | 1500 | 81643 | 81660 | 3270 |
| 1008819 | TCATCATTTTCCAGGGCC | 1536 | 1553 | 81696 | 81713 | 3271 |
| 1008820 | ATCATCATTTTCCAGGGC | 1537 | 1554 | 81697 | 81714 | 3272 |
| 1008821 | TATCATCATTTTCCAGGG | 1538 | 1555 | 81698 | 81715 | 3273 |
| 1008822 | CTATCATCATTTTCCAGG | 1539 | 1556 | 81699 | 81716 | 3274 |
| 1008823 | CCTATCATCATTTTCCAG | 1540 | 1557 | 81700 | 81717 | 3275 |
| 1008824 | TCCTATCATCATTTTCCA | 1541 | 1558 | 81701 | 81718 | 3276 |
| 1008825 | CTCCTATCATCATTTTCC | 1542 | 1559 | 81702 | 81719 | 3277 |
| 1008826 | CTATTTCTTTGTCCAGGA | 1647 | 1664 | 83258 | 83275 | 3278 |
| 1008827 | TCTATTTCTTTGTCCAGG | 1648 | 1665 | 83259 | 83276 | 3279 |
| 1008828 | CTCTATTTCTTTGTCCAG | 1649 | 1666 | 83260 | 83277 | 3280 |
| 1008829 | TCTCTATTTCTTTGTCCA | 1650 | 1667 | 83261 | 83278 | 3281 |
| 1008830 | TTCTCTATTTCTTTGTCC | 1651 | 1668 | 83262 | 83279 | 3282 |
| 1008831 | CTTCTCTATTTCTTTGTC | 1652 | 1669 | 83263 | 83280 | 3283 |
| 1008832 | ACTTCTCTATTTCTTTGT | 1653 | 1670 | 83264 | 83281 | 3284 |
| 1008833 | GTGGTGTGCGCATGTAGA | N/A | N/A | 9003 | 9020 | 3285 |
| 1008834 | GGTGGTGTGCGCATGTAG | N/A | N/A | 9004 | 9021 | 3286 |
| 1008835 | TGGTGGTGTGCGCATGTA | N/A | N/A | 9005 | 9022 | 3287 |
| 1008836 | TACTGTTTCGACCTCTGA | N/A | N/A | 45744 | 45761 | 3288 |
| 1008837 | TTACTGTTTCGACCTCTG | 891 | 908 | 45745 | 45762 | 3289 |
| 1008838 | GTTACTGTTTCGACCTCT | 892 | 909 | 45746 | 45763 | 3290 |

### Example 12: Design of 4-10-6 MOE Gapmers with Mixed Internucleoside Linkages Complementary to Human ATIXN2 RNA

[0520] Modified oligonucleotides complementary to a human ATXN2 nucleic acid were designed. The modified oligonucleotides in the table below are 4-10-6 MOE gapmers. The gapmers are 20 nucleobases in length, wherein the central gap segment comprises eight 2′-deoxynucleosides and is flanked by wing segments on both the 5′ end and on the 3′ end comprising five 2′-MOE nucleosides. The sugar motif for the gapmers is (from 5′ to 3′): eeeedddddddeeeeee; wherein ‘d’ represents a 2′-deoxyribose sugar and ‘e’ represents a 2′-MOE modified sugar. The internucleoside linkages are mixed phosphodiester and phosphorothioate linkages. The internucleoside linkage motif for the gapmers is (from 5′ to 3′): sooossssssssssoooss; wherein ‘o’ represents a phosphodiester internucleoside linkage and ‘s’ represents a phosphorothioate internucleoside linkage. Each cytosine residue is a 5-methyl cytosine. “Start Site” indicates the 5′-most nucleoside to which the gapmer is complementary in the human nucleic acid sequence. “Stop Site” indicates the 3′-most nucleoside to which the gapmer is complementary in the human nucleic acid sequence.

[0521] Each modified oligonucleotide listed in the table below is complementary to human ATXN2 nucleic acid sequence SEQ ID NO: 1 or SEQ ID NO: 2, as indicated. ‘N/A’ indicates that the modified oligonucleotide is not complementary to that particular nucleic acid with 100% complementarity.

TABLE 69
4-10-6 MOE gapmers with mixed internucleoside
linkages complementary to human ATXN2 RNA

| | | SEQ ID | SEQ ID | SEQ ID | SEQ ID | |
|---|---|---|---|---|---|---|
| | | NO: 1 | NO: 1 | NO: 2 | NO: 2 | |
| Compound | Sequence | Start | Stop | Start | Stop | SEQ ID |
| Number | (5′ to 3′) | Site | Site | Site | Site | NO: |
| 1008839 | CTTAGAGTTTTTGCCTTCCA | N/A | N/A | 9931 | 9950 | 3087 |
| 1008840 | GCTTAGAGTTTTTGCCTTCC | N/A | N/A | 9932 | 9951 | 2177 |
| 1008841 | AGCTTAGAGTTTTTGCCTTC | N/A | N/A | 9933 | 9952 | 3164 |
| 1008842 | CGTATGTTTGTCTGTCTTAT | N/A | N/A | 33816 | 33835 | 2262 |
| 1008843 | TGTACTTCACATTTGGAGCC | 991 | 1010 | 48690 | 48709 | 1185 |
| 1008844 | ACTTTTCTCATGTGCGGCAT | 1079 | 1098 | 49253 | 49272 | 1561 |
| 1008846 | TCTGTACTTTTCTCATGTGC | 1084 | 1103 | 49258 | 49277 | 2544 |
| 1008847 | TTCTCTATTTCTTTGTCCAG | 1649 | 1668 | 83260 | 83279 | 804 |
| 1008848 | ACACAGTTTCACTAGGTTCT | N/A | N/A | 57472 | 57491 | 2503 |
| 1008849 | TGGTGGTGTGCGCATGTAGA | N/A | N/A | 9003 | 9022 | 1800 |
| 1008850 | GTTACTGTTTCGACCTCTGA | N/A | N/A | 45744 | 45763 | 3291 |
| 1008851 | TGGATTCTGTACTTTTCTCA | 1089 | 1108 | 49263 | 49282 | 3235 |
| 1008853 | CTCTCCATTATTTCTTCACG | 1123 | 1142 | 49297 | 49316 | 33 |
| 1008855 | CCTATCATCATTTTCCAGGG | 1538 | 1557 | 81698 | 81717 | 158 |
| 1008856 | ACTTCTCTATTTCTTTGTCC | 1651 | 1670 | 83262 | 83281 | 172 |
| 1008857 | GTGATGTTTCATTGGGTTTA | 2460 | 2479 | 91730 | 91749 | 1188 |

### Example 13: Tolerability of Modified Oligonucleotides Complementary to Human ATXN2 RNA in Wild-Type Mice, 3 Hour FOB Assessment

[0522] Modified oligonucleotides described above were tested in wild-type mice to assess the tolerability of the oligonucleotides. Comparator oligonucleotides 564122, 564127, 564133, 564143, 564150, 564188, 564210, 564216, described hereinabove and in WO 2015/143246, were also tested. Wild type C57/Bl6 mice each received a single ICV dose of 700 μg of modified oligonucleotide listed in the table below. Each treatment group consisted of 4 mice. A group of 3 mice received PBS as a negative control for each experiment (identified in separate tables below). At 3 hours post-injection, mice were evaluated according to 7 different criteria. The criteria are (1) the mouse was bright, alert, and responsive; (2) the mouse was standing or lunched without stimuli; (3) the mouse showed any movement without stimuli; (4) the mouse demonstrated forward movement after it was lifted; (5) the mouse demonstrated any movement after it was lifted; (6) the mouse responded to tail pinching; (7) regular breathing. For each of the 7 criteria, a mouse was given a subscore of 0 if it met the criteria and 1 if it did not (the functional observational battery score or FOB). After all 7 criteria were evaluated, the scores were summed for each mouse and averaged within each treatment group. Results are presented as the average score for each treatment group in the tables below.

TABLE 70
Tolerability scores in wild-type mice

| Compound Number | 3 hr FOB |
|---|---|
| 564122 | 7.00 |
| 564127 | 7.00 |
| 564133 | 7.00 |
| 564143 | 7.00 |
| 564150 | 7.00 |
| 564188 | 7.00 |
| 564210 | 7.00 |
| 564216 | 7.00 |

TABLE 71
Tolerability scores in wild-type mice

| Compound Number | 3 hr FOB |
|---|---|
| 708151 | 0 |
| 757066 | 3.00 |
| 760782 | 6.00 |
| 708154 | 5.25 |
| 757052 | 5.50 |
| 755233 | 4.00 |
| 702063 | 5.75 |
| 755235 | 5.25 |
| 756978 | 3.75 |
| 757130 | 4.00 |
| 757162 | 6.00 |
| 757089 | 3.75 |
| 757210 | 6.25 |
| 760771 | 4.00 |
| 708199 | 6.75 |
| 757055 | 3.25 |
| 757234 | 6.00 |

TABLE 72
Tolerability scores in wild-type mice

| Compound Number | 3 hr FOB |
|---|---|
| 874211 | 2.00 |
| 874251 | 3.00 |
| 874216 | 5.00 |
| 874217 | 3.75 |
| 874280 | 4.50 |
| 874249 | 6.50 |
| 874282 | 4.50 |
| 874212 | 2.25 |
| 874279 | 6.25 |
| 874288 | 6.00 |
| 874281 | 4.50 |
| 874327 | 5.00 |
| 874388 | 1.00 |
| 874384 | 4.50 |
| 874246 | 0.25 |
| 874247 | 0 |
| 874250 | 6.75 |
| 874277 | 7.00 |
| 874283 | 7.00 |
| 874334 | 5.00 |
| 874335 | 6.25 |
| 874385 | 4.50 |

TABLE 73
Tolerability scores in wild-type mice

| Compound Number | 3 hr FOB |
|---|---|
| 874771 | 6.25 |
| 874754 | 0 |
| 874702 | 1.00 |
| 874745 | 2.50 |
| 874748 | 5.25 |
| 874752 | 3.00 |
| 874753 | 2.00 |
| 874501 | 0 |
| 874503 | 6.00 |
| 874669 | 0 |
| 874706 | 5.00 |
| 874738 | 5.25 |
| 874782 | 5.00 |

TABLE 74
Tolerability scores in wild-type mice

| Compound Number | 3 hr FOB |
|---|---|
| 874785 | 2.00 |
| 874842 | 6.25 |
| 875389 | 4.50 |
| 875148 | 3.00 |
| 874939 | 5.25 |
| 875032 | 3.25 |
| 875328 | 6.50 |
| 875319 | 2.25 |
| 875341 | 2.25 |
| 875252 | 0 |
| 874969 | 6.00 |
| 875346 | 1.00 |
| 875347 | 0 |
| 874792 | 2.75 |
| 875360 | 2.50 |
| 874874 | 7.00 |
| 874903 | 5.00 |
| 874937 | 0 |
| 875063 | 3.50 |
| 875315 | 5.50 |

TABLE 75
Tolerability scores in wild-type mice

| Compound Number | 3 hr FOB |
|---|---|
| 875485 | 3.50 |
| 875680 | 6.00 |
| 875650 | 3.75 |
| 875804 | 2.00 |
| 875764 | 4.00 |
| 875427 | 6.25 |
| 875966 | 0 |
| 875803 | 2.25 |
| 875477 | 4.00 |
| 875799 | 4.00 |
| 875807 | 3.00 |
| 875822 | 4.00 |
| 875398 | 6.50 |
| 875452 | 2.50 |

TABLE 76
Tolerability scores in wild-type mice

| Compound Number | 3 hr FOB |
|---|---|
| 937471 | 4.00 |
| 937481 | 3.00 |
| 937480 | 1.00 |
| 937508 | 4.00 |
| 937468 | 3.00 |
| 937467 | 1.00 |
| 937456 | 0.75 |
| 937509 | 2.00 |
| 937383 | 2.00 |
| 937385 | 3.50 |
| 937424 | 6.00 |
| 937422 | 6.50 |
| 937478 | 6.00 |
| 937423 | 6.25 |
| 937437 | 0.25 |
| 937477 | 6.00 |
| 937436 | 0 |
| 937421 | 5.50 |
| 937465 | 3.75 |
| 937469 | 2.50 |
| 937470 | 3.50 |
| 937365 | 0 |

TABLE 77
Tolerability scores in wild-type mice

| Compound Number | 3 hr FOB |
|---|---|
| 937680 | 4.00 |
| 937639 | 0 |
| 937794 | 3.00 |
| 937792 | 0 |
| 937547 | 0 |
| 937739 | 3.75 |
| 937633 | 2.00 |
| 937754 | 4.00 |
| 937620 | 3.00 |
| 937611 | 0 |
| 937725 | 0 |
| 937795 | 4.75 |
| 937579 | 1.00 |
| 937591 | 6.00 |
| 937510 | 0 |
| 937572 | 0 |
| 937511 | 1.00 |
| 937738 | 3.00 |
| 937593 | 3.75 |
| 937592 | 4.50 |
| 937748 | 4.50 |
| 937578 | 0 |
| 937618 | 0 |
| 937619 | 0 |

TABLE 78
Tolerability scores in wild-type mice

| Compound | 3 hr |
|---|---|
| Number | FOB |
| 937936 | 4.00 |
| 937939 | 4.00 |
| 937989 | 0 |
| 937938 | 6.00 |
| 937934 | 1.00 |
| 938163 | 0 |
| 937796 | 0 |
| 937987 | 3.00 |
| 938004 | 1.00 |
| 937991 | 0 |
| 938174 | 0 |
| 938173 | 0 |
| 938237 | 4.00 |
| 937983 | 0 |
| 937940 | 6.50 |
| 937942 | 5.00 |
| 937972 | 2.50 |
| 938170 | 0 |
| 938172 | 0 |
| 938221 | 0 |
| 937973 | 4.50 |
| 938043 | 1.00 |
| 938136 | 3.00 |
| 938210 | 2.00 |

TABLE 79
Tolerability scores in wild-type mice

| Compound | 3 hr |
|---|---|
| Number | FOB |
| 874430 | 4.50 |
| 874554 | 4.00 |
| 874639 | 4.00 |
| 874272 | 4.00 |
| 874952 | 4.00 |
| 875348 | 1.00 |
| 874548 | 4.00 |
| 875060 | 2.00 |
| 874627 | 2.00 |
| 874560 | 2.25 |
| 874506 | 1.75 |
| 874610 | 3.50 |
| 874541 | 4.00 |
| 874699 | 1.00 |
| 875880 | 6.00 |
| 875798 | 0 |
| 875445 | 5.50 |
| 875404 | 3.00 |
| 874415 | 3.25 |
| 875831 | 0 |
| 875914 | 5.25 |
| 875351 | 6.00 |
| 875879 | 3.50 |
| 874273 | 6.25 |
| 875458 | 6.50 |
| 875733 | 6.50 |
| 875991 | 6.00 |

TABLE 80
Tolerability scores in wild-type mice

| Compound | 3 hr |
|---|---|
| Number | FOB |
| 874218 | 1.00 |
| 756993 | 1.00 |
| 756994 | 1.00 |
| 708202 | 2.00 |
| 757072 | 1.00 |
| 757073 | 1.00 |
| 756996 | 1.00 |
| 757021 | 2.25 |
| 708201 | 3.00 |
| 756997 | 0 |
| 874213 | 1.00 |
| 757074 | 1.00 |
| 708203 | 2.50 |
| 708152 | 4.50 |
| 708153 | 4.50 |
| 756992 | 6.00 |
| 874215 | 5.00 |
| 708200 | 7.00 |
| 757075 | 4.50 |
| 756959 | 4.25 |
| 1008838 | 6.00 |

TABLE 81
Tolerability scores in wild-type mice

| Compound | 3 hr |
|---|---|
| Number | FOB |
| 874239 | 1.00 |
| 874252 | 1.00 |
| 874219 | 1.25 |
| 874237 | 1.00 |
| 874221 | 2.25 |
| 1008793 | 1.00 |
| 1008792 | 3.25 |
| 1008794 | 3.50 |
| 937364 | 6.25 |
| 1008795 | 5.50 |
| 1008796 | 5.50 |
| 1008797 | 3.25 |
| 874236 | 4.75 |
| 874238 | 3.75 |
| 875033 | 4.25 |
| 937472 | 5.00 |
| 937473 | 4.00 |
| 1008791 | 6.00 |
| 937361 | 5.00 |
| 874549 | 6.50 |

TABLE 82
Tolerability scores in wild-type mice

| Compound | 3 hr |
|---|---|
| Number | FOB |
| 1008806 | 2.50 |
| 1008800 | 0 |
| 1008811 | 0 |
| 1008817 | 2.00 |
| 1008810 | 1.00 |
| 1008803 | 2.50 |
| 1008805 | 1.00 |
| 1008804 | 0 |
| 1008802 | 0.50 |
| 1008799 | 1.25 |
| 1008798 | 4.75 |
| 1008801 | 3.50 |
| 1008807 | 5.25 |
| 1008808 | 3.75 |
| 1008809 | 3.50 |
| 1008813 | 7.00 |
| 1008812 | 6.00 |
| 1008814 | 6.50 |
| 1008815 | 6.00 |
| 1008816 | 4.00 |

TABLE 83
Tolerability scores in wild-type mice

| Compound | 3 hr |
|---|---|
| Number | FOB |
| 1008819 | 1.00 |
| 1008829 | 1.00 |
| 1008830 | 1.00 |
| 1008825 | 0 |
| 1008818 | 1.75 |
| 1008824 | 1.00 |
| 1008822 | 1.00 |
| 1008831 | 0 |
| 1008832 | 2.00 |
| 1008821 | 1.50 |
| 1008823 | 1.00 |
| 1008820 | 4.50 |
| 1008826 | 3.25 |
| 1008827 | 5.00 |
| 1008828 | 3.50 |
| 1008836 | 4.75 |
| 1008837 | 6.00 |
| 1008834 | 7.00 |
| 1008833 | 6.75 |
| 1008835 | 6.25 |

TABLE 84
Tolerability scores in wild-type mice

| Compound | 3 hr |
|---|---|
| Number | FOB |
| 1008854 | 1.00 |
| 1008845 | 1.75 |
| 1008852 | 2.00 |
| 1008853 | 3.00 |
| 1008844 | 2.50 |
| 1008851 | 3.50 |
| 1008856 | 0 |
| 1008855 | 1.75 |
| 1008786 | 5.50 |
| 1008790 | 6.50 |
| 1008846 | 0 |
| 1008843 | 1.00 |
| 937793 | 1.00 |
| 1008787 | 6.00 |
| 1008848 | 0 |
| 1008789 | 6.00 |
| 1008788 | 4.00 |
| 1008847 | 4.00 |
| 1008839 | 5.50 |
| 1008840 | 4.00 |
| 1008841 | 4.00 |
| 1008842 | 4.00 |
| 1008857 | 6.00 |
| 1008850 | 6.50 |
| 1008849 | 6.75 |

TABLE 85
Tolerability scores in wild-type mice

| Compound | 3 hr |
|---|---|
| Number | FOB |
| 1008870 | 1.00 |
| 1008862 | 2.50 |
| 1008874 | 1.25 |
| 1008865 | 1.00 |
| 1008872 | 2.00 |
| 1008871 | 1.00 |
| 1008875 | 1.25 |
| 1008867 | 1.00 |
| 1008863 | 6.50 |
| 1008864 | 5.50 |
| 1008873 | 5.50 |
| 1008866 | 4.00 |
| 1008858 | 4.50 |
| 1008859 | 5.00 |
| 1008860 | 5.00 |
| 1008861 | 6.75 |
| 1008877 | 6.00 |
| 1008876 | 4.00 |
| 1008869 | 5.00 |
| 1008868 | 7 |

TABLE 86
Tolerability scores in wild-type mice

| Compound | 3 hr |
|---|---|
| Number | FOB |
| 1008888 | 1.00 |
| 1008889 | 0.75 |
| 1008881 | 1.00 |
| 1008884 | 2.00 |
| 1008890 | 3.50 |
| 1008887 | 1.00 |
| 1008882 | 1.00 |
| 1008879 | 5.75 |
| 1008880 | 5.25 |
| 1008885 | 4.75 |
| 1008886 | 4.00 |
| 1008895 | 5.50 |
| 1008896 | 6.00 |
| 1008897 | 5.75 |
| 1008878 | 6.25 |
| 1008883 | 6.50 |
| 1008891 | 5.50 |
| 1008892 | 7.00 |
| 1008893 | 7.00 |
| 1008894 | 6.25 |

TABLE 87
Tolerability scores in wild-type mice

| Compound | 3 hr |
|---|---|
| Number | FOB |
| 1008910 | 0 |
| 1008899 | 1.00 |
| 1008901 | 0 |
| 1008908 | 3.00 |
| 1008911 | 1.00 |
| 1008902 | 0 |
| 1008915 | 2.00 |
| 1008900 | 0 |
| 1008909 | 3.00 |
| 1008905 | 3.00 |
| 1008916 | 4.00 |
| 1008917 | 4.00 |
| 1008898 | 3.50 |
| 1008903 | 4.00 |
| 1008912 | 4.75 |
| 1008913 | 4.00 |
| 1008914 | 4.75 |
| 1008904 | 4.00 |
| 1008906 | 4.50 |
| 1008907 | 6.25 |

### Example 14: Tolerability of Modified Oligonucleotides Complementary to Human ATXN2 RNA in Wild-Type Rats, FOB Assessment

[0523] Modified oligonucleotides described above were tested in Sprague Dawley rats to assess the tolerability of the oligonucleotides. Sprague Dawley rats each received a single intrathecal (IT) dose of 3 mg of oligonucleotide listed in the table below. Each treatment group consisted of 4 rats. A group of 4 rats received PBS as a negative control for each experiment (identified in separate tables below). At 3 hours post-injection, movement of 7 different parts of the body were evaluated for each rat. The 7 body parts are (1) the rat's tail; (2) the rat's posterior posture; (3) the rat's hind limbs; (4) the rat's hind paws; (5) the rat's forepaws; (6) the rat's anterior posture; (7) the rat's head. For each of the 7 different body parts, each rat was given a subscore of 0 if the body part was moving or 1 if the body part was not moving (the functional observational battery score or FOB). After all 7 criteria were evaluated, the scores were summed for each rat and averaged within each treatment group. The results are presented in the tables below.

TABLE 88
Tolerability scores in wild-type rats

| Compound | 3 hr |
|---|---|
| Number | FOB |
| 708151 | 2.00 |
| 708154 | 3.00 |
| 755235 | 3.00 |
| 756978 | 3.00 |
| 757130 | 3.75 |
| 757089 | 2.00 |

TABLE 89
Tolerability scores in wild-type rats

| Compound | 3 hr |
|---|---|
| Number | FOB |
| 874211 | 2.25 |
| 874251 | 3.50 |
| 874754 | 1.50 |
| 874745 | 3.00 |
| 874785 | 1.00 |
| 874212 | 2.75 |
| 875148 | 2.50 |
| 875032 | 2.00 |
| 874753 | 3.50 |
| 875319 | 2.25 |
| 875341 | 1.00 |
| 875252 | 1.00 |
| 875485 | 1.75 |
| 874388 | 1.75 |
| 875346 | 1.25 |
| 875347 | 1.00 |
| 874792 | 2.00 |
| 875360 | 3.25 |
| 875477 | 4.00 |

TABLE 90
Tolerability scores in wild-type rats

| Compound | 3 hr |
|---|---|
| Number | FOB |
| 875650 | 4.00 |
| 875804 | 1.75 |
| 875764 | 2.00 |
| 875966 | 0.25 |
| 875803 | 1.50 |
| 875799 | 4.00 |
| 875807 | 1.50 |
| 875822 | 3.75 |

TABLE 91
Tolerability scores in wild-type rats

| Compound | 3 hr |
|---|---|
| Number | FOB |
| 937481 | 3.00 |
| 937480 | 1.25 |
| 937508 | 5.25 |
| 937468 | 2.50 |
| 937467 | 3.00 |
| 937456 | 2.50 |
| 937383 | 1.00 |
| 937385 | 2.75 |
| 937437 | 1.25 |
| 937436 | 2.25 |

TABLE 92
Tolerability scores in wild-type rats

| Compound | 3 hr |
|---|---|
| Number | FOB |
| 937680 | 4.25 |
| 937639 | 1.00 |
| 937547 | 0 |
| 937739 | 3.00 |
| 937633 | 3.00 |
| 937611 | 1.00 |
| 937725 | 0.75 |
| 937579 | 2.00 |
| 937510 | 0 |
| 937572 | 0.50 |
| 937511 | 0.75 |
| 937738 | 4.25 |
| 937593 | 2.00 |
| 937592 | 4.00 |
| 937748* | 3.67 |
| 937578 | 1.75 |
| 937618 | 0.50 |
| 937619 | 1.75 |

*This treatment group included 3 rats

TABLE 93
Tolerability scores in wild-type rats

| Compound | 3 hr |
|---|---|
| Number | FOB |
| 874218 | 2.00 |
| 756993 | 2.75 |
| 756994 | 2.75 |
| 874239 | 1.75 |
| 708202 | 2.75 |
| 757072 | 1.50 |
| 757073 | 2.50 |
| 874252 | 1.75 |
| 756996 | 0.75 |
| 757021 | 4.25 |
| 874219 | 3.00 |
| 708201 | 3.75 |
| 874237 | 2.25 |
| 756997 | 0..05 |
| 874213 | 1.00 |
| 874221 | 3.00 |
| 757074 | 1.50 |
| 708203 | 3.00 |

TABLE 94
Tolerability scores in wild-type rats

| Compound | 3 hr |
|---|---|
| Number | FOB |
| 1008806 | 1.50 |
| 1008800 | 0 |
| 1008819 | 2.00 |
| 1008829 | 1.50 |
| 1008811 | 0 |
| 1008830 | 0.25 |
| 1008825 | 0 |
| 1008817 | 0.75 |
| 1008810 | 0 |
| 1008818 | 2.00 |

TABLE 95
Tolerability scores in wild-type rats

| Compound | 3 hr |
|---|---|
| Number | FOB |
| 1008862 | 0.75 |
| 1008854 | 2.25 |
| 1008845 | 2.00 |
| 1008852 | 3.00 |
| 1008853 | 1.75 |
| 1008844 | 1.50 |
| 1008851 | 3.00 |
| 1008856 | 0.50 |
| 1008855 | 1.00 |
| 1008846 | 1.00 |
| 1008843 | 2.50 |
| 937793 | 1.00 |
| 1008848 | 1.25 |

TABLE 96
Tolerability scores in wild-type rats

| Compound | 3 hr |
|---|---|
| Number | FOB |
| 1008870 | 1.25 |
| 1008874 | 3.00 |
| 1008865 | 1.50 |
| 1008888 | 1.00 |
| 1008889 | 1.00 |
| 1008872 | 2.50 |
| 1008871 | 1.00 |
| 1008875 | 1.75 |
| 1008881 | 2.25 |
| 1008884 | 3.00 |
| 1008887 | 1.25 |
| 1008882 | 2.75 |
| 1008867 | 2.50 |

TABLE 97
Tolerability scores in wild-type rats

| Compound | 3 hr |
|---|---|
| Number | FOB |
| 1008910 | 2.25 |
| 1008899 | 2.50 |
| 1008901 | 2.00 |
| 1008908 | 2.00 |
| 1008911 | 2.75 |
| 1008902 | 2.75 |
| 1008890 | 3.25 |
| 1008915 | 2.25 |
| 1008900 | 2.00 |
| 1008909 | 3.00 |
| 1008905 | 3.25 |

### Example 15: Activity of Modified Oligonucleotides Complementary to Human ATXN2 RNA in Transgenic Mice

[0524] Modified oligonucleotides described above were tested in the BAC-ATXN2-Q22 transgenic mouse model which was generated by using a 169 kb human BAC (bacterial artificial chromosome), RP11-798L5, that contained the entire 150 kb human ATXN2 locus with 22 CAG repeats in the coding sequence, 16 kb of the 5′ flanking genomic sequence, and 3 kb of the 3′ flanking genomic sequence (Dansithong et al., PLoS Genetics, 2015).

[0525] The hATXN2 mice were divided into groups of 3-4 mice each. Two groups were tested with each compound. hATXN2 mice each received a single intracerebroventricular (ICV) dose of 350 μg of modified oligonucleotide. The PBS-injected group served as the control group to which oligonucleotide-treated groups were compared. After two weeks, mice were sacrificed and RNA was extracted from cortical brain tissue and spinal cord for real-time PCR analysis of measurement of RNA expression of human ATXN2 using primer probe set hAtaxin_LTSO1321, described in Example 1 above. Results are presented as percent ATXN2 RNA expression relative to PBS control, normalized to GADPH. As shown in the table below, treatment with modified oligonucleotides resulted in significant of ATXN2 RNA in comparison to the PBS control.

TABLE 98
Reduction of human ATXN2 RNA in transgenic mice

ATXN2
Expression (%
control)

| Compound | Spinal | |
|---|---|---|
| Number | Cord | Cortex |
| 702063 | 17 | 34 |
| 708151 | 19 | 33 |
| 755233 | 16 | 31 |
| 755235 | 8 | 25 |
| 760771 | 85 | 87 |
| 760782 | 13 | 22 |

TABLE 99
Reduction of human ATXN2 RNA in transgenic mice

ATXN2 Expression
(% control)

| Compound | Spinal | |
|---|---|---|
| Number | Cord | Cortex |
| 708154 | 14 | 14 |
| 756978 | 35 | 46 |
| 757052 | 15 | 19 |
| 757066 | 16 | 15 |
| 757089 | 38 | 61 |
| 757130 | 42 | 53 |
| 757162 | 57 | 60 |
| 757210 | 66 | 75 |
| 874211 | 23 | 37 |
| 874212 | 49 | 52 |
| 874251 | 20 | 19 |
| 874388 | 71 | 75 |
| 874745 | 41 | 43 |
| 874753 | 54 | 60 |
| 874754 | 42 | 38 |
| 874785 | 49 | 48 |
| 874792 | 75 | 84 |
| 875032 | 58 | 58 |
| 875148 | 57 | 53 |
| 875252 | 61 | 67 |
| 875319 | 58 | 63 |

TABLE 100
Reduction of human ATXN2 RNA in transgenic mice

ATXN2 Expression
(% control)

| Compound | Spinal | |
|---|---|---|
| Number | Cord | Cortex |
| 874217 | 19 | 29 |
| 874279 | 53 | 52 |
| 874280 | 34 | 34 |
| 874281 | 68 | 62 |
| 874282 | 55 | 50 |
| 874702 | 46 | 41 |
| 874752 | 65 | 53 |
| 875341 | 66 | 67 |
| 875346 | 86 | 79 |
| 875347 | 74 | 81 |
| 875360 | 88 | 90 |
| 875477 | 89 | 94 |
| 875485 | 66 | 74 |
| 875650 | 77 | 76 |
| 875764 | 83 | 78 |
| 875799 | 100 | 100 |
| 875803 | 84 | 87 |
| 875804 | 88 | 78 |
| 875807 | 102 | 107 |
| 875822 | 109 | 108 |
| 875966 | 77 | 80 |

TABLE 101
Reduction of human ATXN2 RNA in transgenic mice

ATXN2 Expression
(% control)

| Compound | Spinal | |
|---|---|---|
| Number | Cord | Cortex |
| 874216 | 16 | 28 |
| 874249 | 30 | 40 |
| 874272 | 50 | 51 |
| 874288 | 48 | 57 |
| 874327 | 65 | 69 |
| 874384 | 71 | 78 |
| 874415 | 84 | 99 |
| 874430 | 19 | 35 |
| 874506 | 49 | 63 |
| 874541 | 48 | 75 |
| 874548 | 42 | 58 |
| 874554 | 32 | 36 |
| 874560 | 45 | 62 |
| 874610 | 58 | 65 |
| 874627 | 50 | 60 |
| 874639 | 39 | 39 |
| 874699 | 63 | 79 |
| 874748 | 42 | 44 |
| 874771 | 31 | 33 |
| 874842 | 45 | 50 |
| 874939 | 54 | 56 |
| 874952 | 56 | 54 |
| 874969 | 60 | 69 |
| 875060 | 60 | 59 |
| 875328 | 54 | 58 |
| 875348 | 54 | 58 |
| 875389 | 60 | 52 |
| 875427 | 70 | 78 |
| 875680 | 65 | 75 |

TABLE 102
Reduction of human ATXN2 RNA in transgenic mice

ATXN2 Expression
(% control)

| Compound | Spinal | |
|---|---|---|
| Number | Cord | Cortex |
| 875351 | 93 | 110 |
| 875404 | 86 | 97 |
| 875445 | 87 | 95 |
| 875798 | 73 | 90 |
| 875831 | 87 | 101 |
| 875879 | 95 | 111 |
| 875880 | 75 | 90 |
| 875914 | 94 | 104 |
| 937383 | 64 | 81 |
| 937385 | 72 | 82 |
| 937422 | 59 | 83 |
| 937423 | 67 | 92 |
| 937424 | 69 | 83 |
| 937436 | 74 | 105 |
| 937437 | 71 | 92 |
| 937456 | 58 | 77 |
| 937467 | 53 | 77 |
| 937468 | 47 | 76 |
| 937471 | 40 | 43 |
| 937477 | 75 | 97 |
| 937478 | 65 | 92 |
| 937480 | 48 | 64 |
| 937481 | 49 | 57 |
| 937508 | 56 | 66 |
| 937509 | 71 | 81 |
| 937510 | 56 | 63 |
| 937511 | 52 | 72 |
| 937547 | 44 | 47 |
| 937572 | 51 | 70 |
| 937578 | 69 | 99 |
| 937579 | 41 | 60 |
| 937591 | 58 | 63 |
| 937592 | 64 | 83 |

TABLE 103
Reduction of human ATXN2 RNA in transgenic mice

ATXN2 Expression
(% control)

| Compound | Spinal | |
|---|---|---|
| Number | Cord | Cortex |
| 937593 | 57 | 74 |
| 937611 | 50 | 57 |
| 937620 | 56 | 55 |
| 937633 | 50 | 54 |
| 937639 | 41 | 44 |
| 937680 | 43 | 42 |
| 937725 | 53 | 57 |
| 937738 | 65 | 73 |
| 937739 | 60 | 53 |
| 937748 | 75 | 89 |
| 937754 | 41 | 54 |
| 937792 | 37 | 46 |
| 937794 | 45 | 45 |
| 937795 | 53 | 58 |
| 937796 | 64 | 76 |
| 937934 | 68 | 72 |
| 937936 | 51 | 52 |
| 937938 | 56 | 65 |
| 937939 | 50 | 61 |
| 937940 | 69 | 86 |
| 937942 | 68 | 87 |
| 937972 | 71 | 87 |
| 937973 | 74 | 93 |
| 937983 | 61 | 84 |
| 937987 | 62 | 76 |
| 937989 | 47 | 63 |
| 937991 | 62 | 78 |
| 938004 | 61 | 77 |
| 938043 | 77 | 94 |
| 938136 | 80 | 98 |
| 938163 | 59 | 73 |
| 938170 | 77 | 88 |
| 938172 | 78 | 89 |
| 938173 | 67 | 81 |
| 938174 | 67 | 79 |
| 938210 | 94 | 110 |
| 938221 | 78 | 92 |
| 938237 | 72 | 83 |

TABLE 104
Reduction of human ATXN2 RNA in transgenic mice

ATXN2 Expression
(% control)

| Compound | Spinal | |
|---|---|---|
| Number | Cord | Cortex |
| 1008786 | 36 | 28 |
| 1008787 | 56 | 53 |
| 1008788 | 71 | 66 |
| 1008789 | 62 | 58 |
| 1008790 | 43 | 39 |
| 1008799 | 49 | 54 |
| 1008802 | 50 | 51 |
| 1008803 | 50 | 39 |
| 1008804 | 51 | 49 |
| 1008805 | 46 | 42 |
| 1008810 | 35 | 32 |
| 1008811 | 32 | 25 |
| 1008817 | 33 | 31 |
| 1008818 | 27 | 33 |
| 1008819 | 9 | 9 |
| 1008821 | 48 | 48 |
| 1008822 | 56 | 40 |
| 1008823 | 65 | 60 |
| 1008824 | 41 | 40 |
| 1008825 | 34 | 30 |
| 1008829 | 35 | 24 |
| 1008830 | 26 | 26 |
| 1008831 | 48 | 46 |
| 1008832 | 40 | 46 |
| 1008800 | 22 | 25 |
| 1008806 | 18 | 26 |

TABLE 105
Reduction of human ATXN2 RNA in transgenic mice

ATXN2 Expression
(% control)

| Compound | Spinal | |
|---|---|---|
| Number | Cord | Cortex |
| 708201 | 27 | 30 |
| 708202 | 23 | 44 |
| 708203 | 46 | 57 |
| 756994 | 12 | 16 |
| 756996 | 14 | 13 |
| 756997 | 29 | 40 |
| 757021 | 15 | 28 |
| 757072 | 24 | 36 |
| 757073 | 14 | 19 |
| 757074 | 45 | 49 |
| 874213 | 33 | 42 |
| 874219 | 21 | 20 |
| 874221 | 44 | 47 |
| 874237 | 34 | 31 |
| 874239 | 23 | 23 |
| 874252 | 23 | 14 |
| 1008793 | 64 | 69 |
| 756993 | 15 | 23 |
| 874218 | 8 | 10 |

TABLE 106
Reduction of human ATXN2 RNA in transgenic mice

ATXN2 Expression
(% control)

| Compound | Spinal | |
|---|---|---|
| Number | Cord | Cortex |
| 937793 | 46 | 52 |
| 1008843 | 44 | 48 |
| 1008844 | 20 | 28 |
| 1008845 | 12 | 20 |
| 1008846 | 36 | 47 |
| 1008848 | 54 | 54 |
| 1008851 | 25 | 23 |
| 1008852 | 10 | 11 |
| 1008853 | 12 | 13 |
| 1008855 | 26 | 23 |
| 1008856 | 26 | 16 |
| 1008867 | 58 | 55 |
| 1008871 | 5 | 7 |
| 1008872 | 11 | 6 |
| 1008875 | 15 | 11 |
| 1008854 | 23 | 24 |
| 1008862 | 14 | 15 |
| 1008865 | 11 | 11 |
| 1008870 | 7 | 10 |
| 1008874 | 13 | 10 |

TABLE 107
Reduction of human ATXN2 RNA in transgenic mice

ATXN2 Expression
(% control)

| Compound | Spinal | |
|---|---|---|
| Number | Cord | Cortex |
| 1008881 | 17 | 20 |
| 1008882 | 39 | 46 |
| 1008884 | 8 | 11 |
| 1008887 | 44 | 36 |
| 1008890 | 13 | 14 |
| 1008899 | 13 | 18 |
| 1008900 | 30 | 46 |
| 1008901 | 12 | 31 |
| 1008902 | 23 | 31 |
| 1008905 | 69 | 72 |
| 1008908 | 24 | 27 |
| 1008909 | 27 | 50 |
| 1008911 | 21 | 24 |
| 1008915 | 40 | 42 |
| 1008888 | 18 | 14 |
| 1008889 | 10 | 12 |
| 1008910 | 23 | 23 |

1.-37. (canceled)

38. A modified oligonucleotide according to the following formula: [chemical structure]
or a salt thereof.

39.-42. (canceled)

43. The modified oligonucleotide of claim 38, which is a sodium salt or a potassium salt.

44. (canceled)

45. A modified oligonucleotide according to the following formula:

[chemical structure]

46.-56. (canceled)

57. A population of modified oligonucleotides of claim 38, wherein all of the phosphorothioate internucleoside linkages of the modified oligonucleotide are stereorandom.

58. A pharmaceutical composition comprising the modified oligonucleotide of claim 38 and a pharmaceutically acceptable diluent or carrier.

59. The pharmaceutical composition of claim 58, wherein the pharmaceutically acceptable diluent is artificial cerebrospinal fluid or phosphate-buffered saline (PBS).

60. The pharmaceutical composition of claim 59, wherein the pharmaceutical composition consists essentially of the modified oligonucleotide and artificial cerebrospinal fluid.

61.-67. (canceled)

68. An oligomeric compound comprising a modified oligonucleotide according to the following formula: mCes Teo Geo mCeo Tds Ads Ads mCds Tds Gds Gds Tds Tds Tds Geo mCeo mCeo mCes Tes Te (SEQ ID NO: 3321); wherein,
A=an adenine nucleobase,
mC=a 5-methylcytosine nucleobase,
G=a guanine nucleobase,
T=a thymine nucleobase,
e=a 2′-MOE modified sugar moiety,
d=a 2′-deoxyribose sugar moiety,
s=a phosphorothioate internucleoside linkage, and
o=a phosphodiester internucleoside linkage.

69.-74. (canceled)

75. The pharmaceutical composition of claim 59, wherein the pharmaceutical composition consists essentially of the modified oligonucleotide and PBS.

76. A pharmaceutical composition comprising the modified oligonucleotide of claim 43 and a pharmaceutically acceptable diluent or carrier.

77. The pharmaceutical composition of claim 76, wherein the pharmaceutically acceptable diluent is artificial cerebrospinal fluid or phosphate-buffered saline (PBS).

78. The pharmaceutical composition of claim 77, wherein the pharmaceutical composition consists essentially of the modified oligonucleotide and artificial cerebrospinal fluid.

79. The pharmaceutical composition of claim 77, wherein the pharmaceutical composition consists essentially of the modified oligonucleotide and PBS.

80. A pharmaceutical composition comprising the modified oligonucleotide of claim 45 and a pharmaceutically acceptable diluent or carrier.

81. The pharmaceutical composition of claim 80, wherein the pharmaceutically acceptable diluent is artificial cerebrospinal fluid or phosphate-buffered saline (PBS).

82. The pharmaceutical composition of claim 81, wherein the pharmaceutical composition consists essentially of the modified oligonucleotide and artificial cerebrospinal fluid.

83. The pharmaceutical composition of claim 81, wherein the pharmaceutical composition consists essentially of the modified oligonucleotide and PBS.

84. A pharmaceutical composition comprising the oligomeric compound of claim 68 and a pharmaceutically acceptable diluent or carrier.

85. The pharmaceutical composition of claim 84, wherein the pharmaceutically acceptable diluent is artificial cerebrospinal fluid or phosphate-buffered saline (PBS).

86. The pharmaceutical composition of claim 85, wherein the pharmaceutical composition consists essentially of the oligomeric compound and artificial cerebrospinal fluid.

87. The pharmaceutical composition of claim 85, wherein the pharmaceutical composition consists essentially of the oligomeric compound and PBS.

88. A population of modified oligonucleotides of claim 45, wherein all of the phosphorothioate internucleoside linkages of the modified oligonucleotide are stereorandom.

89. A population of oligomeric compounds of claim 68, wherein all of the phosphorothioate internucleoside linkages of the modified oligonucleotide are stereorandom.

90. A pharmaceutical composition comprising the population of modified oligonucleotides of claim 57 and a pharmaceutically acceptable diluent or carrier.

91. The pharmaceutical composition of claim 90, wherein the pharmaceutically acceptable diluent is artificial cerebrospinal fluid or phosphate-buffered saline (PBS).

92. A pharmaceutical composition comprising the population of modified oligonucleotides of claim 88 and a pharmaceutically acceptable diluent or carrier.

93. The pharmaceutical composition of claim 92, wherein the pharmaceutically acceptable diluent is artificial cerebrospinal fluid or phosphate-buffered saline (PBS).

94. A pharmaceutical composition comprising the population of oligomeric compounds of claim 89 and a pharmaceutically acceptable diluent or carrier.

95. The pharmaceutical composition of claim 94, wherein the pharmaceutically acceptable diluent is artificial cerebrospinal fluid or phosphate-buffered saline (PBS).

The application's sequence listing, which the Patent Office published only in electronic form, follows.

SEQUENCE LISTING (3390 sequences)

SEQ ID NO: 1 - RNA, 4712 nt, Homo sapiens
  source 1..4712: mol_type = mRNA
acccccgagaaagcaacccagcgcgccgcccgctcctcacgtgtccctcccggccccggggccacctcacgttctgcttccgtctgacccctccgacttccggtaaagagtccctatccgcacctccgctcccacccggcgcctcggcgcgcccgccctccgatgcgctcagcggccgcagctcctcggagtcccgcggtggccaccgagtctcgccgcttcgccgcagccaggtggcccgggtggcgctcgctccagcggccggcgcggcggagcgggcggggcggcggtggcgcggccccgggaccgtatccctccgccgcccctcccccgcccggccccggcccccctccctcccggcagagctcgcctccctccgcctcagactgttttggtagcaacggcaacggcggcggcgcgtttcggcccggctcccggcggctccttggtctcggcgggcctccccgccccttcgtcgtcctccttctccccctcgccagcccgggcgcccctccggccgcgccaacccgcgcctccccgctcggcgcccgcgcgtccccgccgcgttccggcgtctccttggcgcgcccggctcccggctgtccccgcccggcgtgcgagccggtgtatgggcccctcaccatgtcgctgaagccccagcagcagcagcagcagcagcagcagcagcagcagcagcaacagcagcagcagcagcagcagcagcagccgccgcccgcggctgccaatgtccgcaagcccggcggcagcggccttctagcgtcgcccgccgccgcgccttcgccgtcctcgtcctcggtctcctcgtcctcggccacggctccctcctcggtggtcgcggcgacctccggcggcgggaggcccggcctgggcagaggtcgaaacagtaacaaaggactgcctcagtctacgatttcttttgatggaatctatgcaaatatgaggatggttcatatacttacatcagttgttggctccaaatgtgaagtacaagtgaaaaatggaggtatatatgaaggagtttttaaaacttacagtccgaagtgtgatttggtacttgatgccgcacatgagaaaagtacagaatccagttcggggccgaaacgtgaagaaataatggagagtattttgttcaaatgttcagactttgttgtggtacagtttaaagatatggactccagttatgcaaaaagagatgcttttactgactctgctatcagtgctaaagtgaatggcgaacacaaagagaaggacctggagccctgggatgcaggtgaactcacagccaatgaggaacttgaggctttggaaaatgacgtatctaatggatgggatcccaatgatatgtttcgatataatgaagaaaattatggtgtagtgtctacgtatgatagcagtttatcttcgtatacagtgcccttagaaagagataactcagaagaatttttaaaacgggaagcaagggcaaaccagttagcagaagaaattgagtcaagtgcccagtacaaagctcgagtggccctggaaaatgatgataggagtgaggaagaaaaatacacagcagttcagagaaattccagtgaacgtgaggggcacagcataaacactagggaaaataaatatattcctcctggacaaagaaatagagaagtcatatcctggggaagtgggagacagaattcaccgcgtatgggccagcctggatcgggctccatgccatcaagatccacttctcacacttcagatttcaacccgaattctggttcagaccaaagagtagttaatggaggtgttccctggccatcgccttgcccatctccttcctctcgcccaccttctcgctaccagtcaggtcccaactctcttccacctcgggcagccacccctacacggccgccctccaggcccccctcgcggccatccagacccccgtctcacccctctgctcatggttctccagctcctgtctctactatgcctaaacgcatgtcttcagaagggcctccaaggatgtccccaaaggcccagcgacatcctcgaaatcacagagtttctgctgggaggggttccatatccagtggcctagaatttgtatcccacaacccacccagtgaagcagctactcctccagtagcaaggaccagtccctcggggggaacgtggtcatcagtggtcagtggggttccaagattatcccctaaaactcatagacccaggtctcccagacagaacagtattggaaatacccccagtgggccagttcttgcttctccccaagctggtattattccaactgaagctgttgccatgcctattccagctgcatctcctacgcctgctagtcctgcatcgaacagagctgttaccccttctagtgaggctaaagattccaggcttcaagatcagaggcagaactctcctgcagggaataaagaaaatattaaacccaatgaaacatcacctagcttctcaaaagctgaaaacaaaggtatatcaccagttgtttctgaacatagaaaacagattgatgatttaaagaaatttaagaatgattttaggttacagccaagttctacttctgaatctatggatcaactactaaacaaaaatagagagggagaaaaatcaagagatttgatcaaagacaaaattgaaccaagtgctaaggattctttcattgaaaatagcagcagcaactgtaccagtggcagcagcaagccgaatagccccagcatttccccttcaatacttagtaacacggagcacaagaggggacctgaggtcacttcccaaggggttcagacttccagcccagcatgtaaacaagagaaagacgataaggaagagaagaaagacgcagctgagcaagttaggaaatcaacattgaatcccaatgcaaaggagttcaacccacgttccttctctcagccaaagccttctactaccccaacttcacctcggcctcaagcacaacctagcccatctatggtgggtcatcaacagccaactccagtttatactcagcctgtttgttttgcaccaaatatgatgtatccagtcccagtgagcccaggcgtgcaacctttatacccaatacctatgacgcccatgccagtgaatcaagccaagacatatagagcagtaccaaatatgccccaacagcggcaagaccagcatcatcagagtgccatgatgcacccagcgtcagcagcgggcccaccgattgcagccaccccaccagcttactccacgcaatatgttgcctacagtcctcagcagttcccaaatcagccccttgttcagcatgtgccacattatcagtctcagcatcctcatgtctatagtcctgtaatacagggtaatgctagaatgatggcaccaccaacacacgcccagcctggtttagtatcttcttcagcaactcagtacggggctcatgagcagacgcatgcgatgtatgcatgtcccaaattaccatacaacaaggagacaagcccttctttctactttgccatttccacgggctcccttgctcagcagtatgcgcaccctaacgctaccctgcacccacatactccacaccctcagccttcagctacccccactggacagcagcaaagccaacatggtggaagtcatcctgcacccagtcctgttcagcaccatcagcaccaggccgcccaggctctccatctggccagtccacagcagcagtcagccatttaccacgcggggcttgcgccaactccaccctccatgacacctgcctccaacacgcagtcgccacagaatagtttcccagcagcacaacagactgtctttacgatccatccttctcacgttcagccggcgtataccaacccaccccacatggcccacgtacctcaggctcatgtacagtcaggaatggttccttctcatccaactgcccatgcgccaatgatgctaatgacgacacagccacccggcggtccccaggccgccctcgctcaaagtgcactacagcccattccagtctcgacaacagcgcatttcccctatatgacgcacccttcagtacaagcccaccaccaacagcagttgtaaggctgccctggaggaaccgaaaggccaaattccctcctcccttctactgcttctaccaactggaagcacagaaaactagaatttcatttattttgtttttaaaatatatatgttgatttcttgtaacatccaataggaatgctaacagttcacttgcagtggaagatacttggaccgagtagaggcatttaggaacttgggggctattccataattccatatgctgtttcagagtcccgcaggtaccccagctctgcttgccgaaactggaagttatttattttttaataacccttgaaagtcatgaacacatcagctagcaaaagaagtaacaagagtgattcttgctgctattactgctaaaaaaaaaaaaaaaaaaaaatcaagacttggaacgcccttttactaaacttgacaaagtttcagtaaattcttaccgtcaaactgacggattattatttataaatcaagtttgatgaggtgatcactgtctacagtggttcaacttttaagttaagggaaaaacttttactttgtagataatataaaataaaaacttaaaaaaaatttaaaaaataaaaaaagttttaaaaactgaaaaaaaaaaa

SEQ ID NO: 2 - DNA, 151001 bp, Homo sapiens
  source 1..151001: mol_type = genomic DNA
tcccaaagtgctgggattacaggcgtgagccaccacactggccaaaacttgttcttaagattgtattctgggaccttgattccaatcagagaaaagtgattgtatttttttatttttattttttttagataaagtttcgctcttgttgcccaggctggagtgcagtggtgccctctttggtcactgtaacctccgcctcctgggttcaagcgattctcctgcctcagcatcctgcgtagctgagatcacagatgcccaccaccacgcccagctaattttttcgtatttttagtagcgatggggtttcaccatgttggccacgctggtcttgaactcctgacctcaggtgatccatccgcctcggcctcccagagtgctgggattacaggtgtgagccaccgcgccaggccaagtgtttgtatttctattaaagaaagaatataacgggacaccattgacgacctgctccattgcaggcctccttgctgttcctcagactcccccctcagagcctttgccctcgctgtgccctccacctggagcgtttctccccaggatcctcatgcccatgctcatttgggtccctgccccatgtcaccctctccaggagcttcccctcacagcagccctggcctgtaccacagccgggtacaggtatttttttgtttcaactggttttttagttccagtttcctttaggttactttatttatttatttatttatttattttttgagacggagtctcgctctgtcgcccaggctggagtgcatgatctcggctgactgcaacctccacctcccggattcaagcaattctcctgtatcagcctcccgagtagctgggattacaggcgcccaccaccacacccggctaatttttatatttttggtagagacggggtttcaccatgttggctaggctaggttaatttttaaagggttttgcaatggtcccttgatctactttttaccttagatgggaaataaaactgatttcctacattggcagaatacaatgatcatttttgcctggactatctaggaggttaatttcagttggactactgaaaactgctggttcaatcattctccacgtttatctaagtctttacctttatctggacagttctaggacattgaggggaattttggtgtttcttcccctattatttcctgaagtcatttcactttaaaaaacaatagattcactgctcaaaaaaaaaaaaaaaagttacctactttctacttgcttccagtttaactgcaacacattttaaaaagagtctactgtgctggctgggtaagttaaattaaaacttctaaagggtccaaggtctaaagttcgcacattgttttgaggtcggctctgtctctaccgagggagatcccattatccgtagttctaccagtcccaatcccatatatttcctttagaatctcatgaatgaggaaaaagaagttcaagtgagggaacataggttcaaatgaaggtcagatacctaaaagagttttctggtgactgtgcgcggctggggtggaaaaagtggggaaaaggtacccagatgtgggtggccccggagggttgctccactccagccccggcagggcaggacagcgcggcctgcctggtagatgccccgagccactggagcgcctactgtgtggcgggcgggggacggcaggaaaacggcaggatgctgtgtcccctgaatctggcagggttctaggtgctttacacgtagcaagacacattctccgccccaaggcactcgcagtcagtccattttctgggttgcatcaggtgggggcaaactaggtccccgcagaagtgaagatgctgaaggaatacagtaggagaagaaatgcttctctcctgtcctccacaccaggcaggccccagaggctgagaccgacacgccctccccgaagggcagacccgccttgaggaaggcggatccgggtagggaccgccgcctggccctcacccgacccccgagaaagcaacccagcgcgccgcccgctcctcacgtgtccctcccggccccggggccacctcacgttctgcttccgtctgacccctccgacttccggtaaagagtccctatccgcacctccgctcccacccggcgcctcggcgcgcccgccctccgatgcgctcagcggccgcagctcctcggagtcccgcggtggccaccgagtctcgccgcttcgccgcagccaggtggcccgggtggcgctcgctccagcggccggcgcggcggagcgggcggggcggcggtggcgcggccccgggaccgtatccctccgccgcccctcccccgcccggccccggcccccctccctcccggcagagctcgcctccctccgcctcagactgttttggtagcaacggcaacggcggcggcgcgtttcggcccggctcccggcggctccttggtctcggcgggcctccccgccccttcgtcgtcctccttctccccctcgccagcccgggcgcccctccggccgcgccaacccgcgcctccccgctcggcgcccgcgcgtccccgccgcgttccggcgtctccttggcgcgcccggctcccggctgtccccgcccggcgtgcgagccggtgtatgggcccctcaccatgtcgctgaagccccagcagcagcagcagcagcagcagcagcagcagcagcagcaacagcagcagcagcagcagcagcagcagccgccgcccgcggctgccaatgtccgcaagcccggcggcagcggccttctagcgtcgcccgccgccgcgccttcgccgtcctcgtcctcggtctcctcgtcctcggccacggctccctcctcggtggtcgcggcgacctccggcggcgggaggcccggcctgggcaggtgggtgtcggcaccccagccccctccgctccgggcccggcgtcccctcccccgcggcccgcgccgccgtccccgccccgtgacccgccgggctacccggggtgggctgggggccggcagcgcgggggagactcgctcgggcctgagccccgaggctcggccggtgggcgcagccggggtcctctgggattgtcaggcctgtccagcctcccgcagcatccccgccccctcccccggcggtcaagatggagggagcgggcggcctcccctccccacgcgtgttgggaggggttctcgggtagcggcgatggtcagccccggctcccccttccgcacgatcctccgcccgcagcgtggggatgctcgggcagctcctccactcccggtttaggtgtgaacgttggaggggtctggaggctgtggtggcgttttccggaacatgtccccctccatgggggacatctctggaggggagaagttagggccgcgtcccccgtgccggttaaaggggtaggcaccgggctcctccggaatcatcagggtctgtcggggctctctccccgccccctccgagtcctgggaaagatcggaggacggggtggagacaagtgggccttggcccccgcacccctctgcgttcgtgtccgaggcggcggcgggggctcccgaactcccctgaaatcgtggggctccatgtggcctccggcagcgttccaccctcccccacctggggaagggaaggggtggggagtgcccggccccgtcccggccttcctccttcccccgccagacctctccggcgcgcgggtggtggccgatccgcattgctgttcgaggccgcagtggagaaggcgcctgtggaacatcggtgggtgagggctggacccaggctggaccctggagatccggggtggcggtgctggtggcagggggcgggcaccctgcgcacttatcccaacccccgccccaatttcggaaatgctaggagagagagattgcagcaggggacgtggtcgggttcctgaaggcagaaaggcgggtgtttactagcgtctttttccctcctaagccggggttgtagtaggggctgggggctcagtgttgtcccggctaactgggtttgactcgagggtgtgtttgtgcaggagggcctgttgggggtggcgggcggttgtcagttcgtatttcacgaactaagaaaatgcttagtgttcaaagggagaaggaaacgtcaatagactccattccattgtggccggtgtccttaacttcgggagtgccgccagagcttaccaagggcacgcaagtccatttcccttgtgcctcaagtccatccgtgttgtaggcactactgtgccttctttaggcctaggccgccggcttgacggcgggtgaccggcgtcctccttaaataggcatcttgggctttggaaggtggaataagaggatttttcattcacccgagttttctttttgaaaacacattttcagcaacccatttccaaagaatttttatttacagcagaaattccccatcaagaggaatcagctggtttttaaggaattctgctgccttcaaagggggcggaaacagtcggttatttgactttacacgccccgcccccccttccccttctctgagtctgaagcatcccaaacactacttagccaaactagttcagatgaagtgatcgtttccccaagtagggtaacttcagtttccctttttcgttggcatctagcgaaaaatgaaaaaatttaaaatacaacttttatagaaaaggatgtattctgtttttactttcttaggtattaggaagagatttggcagataattcaacatgttcaaatatataaacattaaaactaaggttattaagttgcattgactactaggcttaaaaattagattataagagaatttgctcctgagtagtttgagtgatcaaagatatttggaatgttttagtaccacaaggtcttttttctgttccttgaggctttacaacaatttaaggttaatttagatttttccttgctttaagttcttttacttgagacctaaatggcagcccttattctttctgatgaataggtgaaattttgtttactgtgttggatttgtgtaatgtgaagttttattcttgaacagatcgttaatgtacttgtagaattactttgaatttgaatcactttcctgcattccttgtaaataagtttcagcttctagaatctcctcacttaggtttgtgcgtatcaacagtgaaaataagtctctgagagcaagggtgaaaaaaaatgcagcattcggtttgacaagtttcgagatagcaaaatatgcttgaaagtctggaaattcacatctgctttaagaaacatttcataatttgactttgtgtgtgtgtgtgtgaatagtttttcatgactttcagaagtgatttattttgttctttgttatatatatttttgaaggtggctgttttaggaaagataatgtaatcacaatattagaacataattttactgtaatctaattttgtgtgtgtgtgtgtgtgtgtgtgtgtgtgtgtgtgtgtgttttggatggaatctcactctgtcgcccaggctggagtgcagtggcctgatctcagcttactgcagtctctgtctcctgggttcatttaagtgattctccagcctcagcctccccagtagctgggattacaggttcgtgctaccacacctggctaatttttttgtatttttagtgaggacgggattttgccatgttggccaggctggtctcgaactcctgacctcaagtgatccgcctgccttggcctcccaaagtgctgggattacaggcgtgagctactgcccctggccaatttttgtatttttagtagagatggggtttcaccatgttggccaggctggtctcgaactcctcctgacctcaagtgattcgccagcctcggcctcccaaagtgccaggattacaggcaggaatgagccactgcccccaaccatcagtctaattcttatttttgctttttaccttttcatttttatgtagtagaggtgattgtgtatgttattttgtagttagcttttttcccctgaacgttgtattgtaaatgtaaatttttttttttttttttgagacagagtctcggtgtttgcccagtctgaagtgcagtggtacgatctcagctcactgcagcctctgactcctgggttcaagcgattctcccacctcagcctcttgagtagctggggctacaggaatgttccaccacgcttggctaatttttgtatttttggtagagacaaggtttcaccatgttggccagtttggtctcgtactaccgacctcaggtgatgcgcccgcctcggcctcccaaagtgctgggattgcaggcgtgagccactgcgcccggctgtaaggtttttacttaaccattctattgttgggaattgggtttccacttttttgttatagatagtggtgcagtgaacatttttaaatagctttttgcttcagtgtaattatttccttagagaaagttaccaagagtggttttactagttcagagggcttcaggatttttatggctcttgctagcggtgctctattattctttagaagacttgtattacttccagtgtcaagaaggttgctcttccatggaatggtttctttgtagtttgtcaaatattgtggggaatttttaaaggaaaaattgcatttttactgtcaagtgcatatattattaagtgcttttgttagttactggattattgatatttgagtttaatttggttcctctgaggatttaataaggtaatatatgtgaagatgttttgaaacctgtaaccattattattaatgagggtacttggtttatctgtcgtgctgatagtactgagtaaagtgcaggaatgaaattcctgaggaactgttctaaagctttgttgttgttgttaacctttctttttcatctgaaagtgttttttattagctgctagcctatgaccaagttatttttggtaacttttttgtaatttcatggcactattgggaattttcgctggttgactcttcttcttctacattcccttccccattaaaaataaaaatatggatttacaattgttactctattcctaaacctaaataatatgacattagaattgcttgggatacaggattcagtctgaataaaatatttttcttttagtgattttcagcttagtatttttactgcttctttctcttgaggcattgcaacttaaaaattgtgctgtttagccaggcgcctgtaatcccagctacttgggaggctgaggcaggagcatcacttgagcccaggaggcggaggttgcagtcagctgagattgtgccactgcactccagcctgggagacagagtgagactctatctcaaaaaaaaaaaaaatgtgctgtgatttaatgtagttgttcatcatgcttccatttaaatttcagtgagactgttcatcttttgcagttaaatatcttgtagaagggcctaaaatatctacgttgaatacagctttattgaagcatctatgtacatggggtttttgggatgaatcagtgaataaagcaaacatattgtccttttggagtttacattctaatgtgactaggcagacaatgagacattaaattaccagcctatgtataatagtgtataagagctatggaattagaagaaagcagattaaaggtatagggagtgtggggaggggaatgagttacaattttaaatggattgggggaacttaattgaggagctaacatttgagcaaagatttgaaggttgggtatttagccgtttgctttttatctaggttaattagtcatgtggcttcattagtaatttataaggtttaaatggcatcatcctttgttattcttttatgtgcacattgatactaaccatctctgaagttagaccaaaaaagttaattgacattgagggtcattagaggtaaattgtagatggctattactaaccaaagagacatgttttgtttttcttttgggcttacgtattttacctaattagtttagtttttgtttcaagtatgtggagaaaataaactttttaagtttgggccaaaacttgctttggttttctttttctttttctttttttttttttaagagaaaaatgtaagcctgtagttgcttaaagattccacattctgaaacagtgaaaacatgggatcagtcatggtgttcctttttttggttaaatgtaaacttgtattttcagtgttactctaattagcaatggtttatacttctacataagggatgttaactcatattgtagctatttaatagccatatattttgacttaaaggaggatctcaaggccaggcgcggtggctcatacctgtaatcccagcactttaggaggctgaggcgggtggatcacctggggtcaggagtttgagactagtctggccaacatggtgaaacccccatctctactaaaaatacaaaaattagccgggcatggtggtgggcgcctgtaatcccagcttcttgggaggctgagggaagagaattgcttgatcccggaggttgcaatgagtgcggaggttgcagtgagctgagatcatgccattacactccagcctgggcaacagagcgagactctgtctcaaaacaaacaaacaaacaaaaaaaggaggatctcatttttttgtcctaaatagctacagccgtgttagaactgtcaccttagcaaagtattgtttttttactttgaaacgaattttaaggttttagaagattgttctctagaattacaattttctgttttgactagtgatagtattttgatgttgtgtaaatagttgagcatgaacaaaaccctatttttttttttagctatttcaagtgattgtgacaacttcaacggagatgtaaacagtttattaacagtcacacctattatcttttttttttttttttttttttgagacggagtcttgctctgtcgcccaggctggagtgcagtggcacgatctctgcttactgcaacctttgcctcccgggttcaagtgattctcctgcctcagcctcctgagtagctgggtctacatgcgcacaccaccacgcctggctaatttttgtatttttagtagagacagggtttcaccatgttggctagaatggtctcaaactcctgacctcaggtgatccacctgcctcagcctcccaaagttctgggattacaggcatgagccaccgtgcttggccgctgccgtatctttttaaatgaaagtacttgtgttttttttgtttttttccaaaggatatctgggtcatctatgatgttactgttaccatctaagggtttttttgtttgtttttgagacagagtctctgtcgcccaggctggagtgcagtggcgtgatcttggctcactgcaacctccgcctcccaggttcaagcaattctcctgccttagccctcccgaatagctgggattacaggcacccgccaccatgcctggctaagttttgcatttttagtagatatggagtttcaccatgttggccaggctgctcttgaactcctgacctcaggtgattcgcttgcctcggcctcccaaagtgctgggattacaggcgtgagccacccccgcccagcctcatgagctaaggtgttttttttttttttgagacagttttgctctttcccaggctggagtgcagtggtgcaatctcagctcactgcaacctctgtttcccgggttcaagcgattctcctgcctcagccttctgagtagctgagattacaggtgcctgctaccccactcagctaatttttgtatttttagcagagacagggtttcaccatgttggttaggctcatctcgaactcctgaccttaagcgatccacctgccttggcctcccaaagtgctgggattataggcatgagccaccgtgcgcagcctaccctgtctcttaaaaaacagtaacaacaacaacaacaacaaaaaatcctaaatcttaaaaatggaaggcaaaaactctaagctttgagagattaggggacttgcccaaagcaatatttgtaggattttattacacctctccctttatttatttttttagagtcaaggtctccctctgtcacccaggctggagtgcagcctcaatctatggggccaagcatttctcctgtcttagcctcctgagtagctggaactacaggtgtacaccagctggctaacatttaaattttttgtagagacagggtcctgccatgttgcccagattggtctcaaactcctgggctcaagtgatcctcctgcctcagcttcccaaagtgctgagattacaggtgtgagccactgcaccgagccccctccctttatttttatttttaaattttaagttctggggcccctcccttgaaataaatagaaacgtaatatatacacaagatcatgctgtgtattttaaggcaatggtcctcaacctttttaacactagggaccggttttgtggaagatggtttttccataggggcaggggatgattttgagatgaaactgttccaccggccgggcacggtggctcacgcctgtaatcccagcactttgggaggccgaggcgggcagatcacgaggtcaggagatcgagaccatcctggctaacatggtgaaacccccctctactaaaaatacaaaaaaattagctgggcgcggtggagggcgcctgtagtcacagctactccggaggccgaggcaagagaatggcatgaaacccgggaggcagagcttgcagtgagctgagatagcaccactgtacttcagcctgggggacaaagtgagactccgtctaaaaaaaaaaaaattgttccacctcagatcattatgcatttgttagattctcataaagagcatacaacctacatctcttgctatatgcagttcccagtagggtttgtgcttctataagaacctaatgctgcacctgatctaacaggtggggctcaggtgctaatgctcacacagctcctgttgtgcagtctggttcctaacaggcctgtttttttttttttaattagatggagtctcgctctgtcaccaggctggagtgcagtggcacgatctcagctcactgcaacctctgcctcccgggttcaagcgattctcctgccttagcctcccatgtagttggtactacaggcgcacactgtgatgcccagctaatttttgtatttttagtagagacggggtttcaccatgttggccaggatggtgtcgatctcctgaccttgtgatccgcccaacagcctcccaaagtgctggaattacaggcgtgagctgctgcgtccggccccctaacaggcttgttttatggaatacagtcacggacagtacttgcccttcaggatatctttttgtaaccttgattttggcttgctaaaataggaggtctattttcttttctttgtttttaatgtatgtggttctgtacttacgtggtgtgaaatctacataaatgttaaatccttggttatttatttattttgagacagagtctcactctgtcacccagtctggaaagcagtggcataatctcggctcactgtaacctccacttcccaggttccagtgattctcctgcctcagcctcctgagtagctgggattacaggcatgcaccactacacctggcaaatttttgtatttttttttagtagagatggggtttcaccatgttggccaggctcgtcttgaactcctgaccttaggtgatctgcctgtcttggcctcccaaagttttgggattacagcatgagccactgcgcctcgccttatttttttgagacaggttctagctctgtcacccaggcgggagtgcagtggtgccatcatggctcattgcaacctcgagttctcaggcccaagtgatcctcctatctcagcctcctgagtagctgggaccacaggcatgcgccactatgcccagcaaaatttttgtttcactctgttgcctagggtggggtgcagtggcaggatatcggctcagtgcaacctctgcctcttgcgttcaaatgattctcatgcctcagcctcccgagtagctgggattataggcatgcgccactacacctggctaatttttgtattattggtagagatggggttttatcatgttggccaggctggtctcgaactcccgacctcaggtgatccatataccttggcctcctgaagtgctggaattacaggcataagccactgcgcctagcttttttgtttgtttttattttgtagggacagagattttacctgttgcccaggatggccttgaattcctgacctcaaacaatttgccctccttggcctcccaaggtgctgggattacaggtgtgagccactatgcctggctggttttttaaattattattattgtttgtgtgtgtgtgttgcaggatcttaccctgtcacccaggctggaatgcagtgatgtgatctcggcttactgcaacctccgcctcctaggttcaagtgattgtcctgcctcagcctcctgagtagctgggataacagctgtgtgccaccatgcctggctaatttttgtatttttagtagagatggggtttcatcatgttggccaggctggtctcgaactcctgaccttagatgatccacccgcctcgtcctcccaaagtgctgggattacaggtgtgagccaccgtgaccagtttggtttagtttttttttttttttttttttttttttttttttgagaaatctcgctctgtcgcccaggctagagtgcggtgacacaatctcagctcactgcaagctccacctcccaggttcatgccattctcctgcctcagcctcccgagtagctgggactacatgcgcccgccaccatgcccggctaattttttttatgcattttaagtagagatggggtttcactgtgttagccaggattgtctcaatctcccgacctcttgatctgcccgcctcggcttcccaaagtgctgggattataggcatgagccaccgcgtccggcctggtttggtattttttttatgagtctgggttgtttatgaaaacttgtcacagctgttaaccttaactttttttttttcttttttttccgagacggagtctcgctctgtcacctaggctggagtgcagtggtgcgatctcggctcattgcaacctctgcctcccaggttaaagcgatttttctgcctcagcctcctgagtagctgggactgcaggcacgcaccatctcgcctggctaatttttgtattttagtagagatggggtttcaccatattggccaggctggtctggaacttctggcctcaagtgatccacctgccttggcctcccatgcctggcaaccttaactttttatttgctggtaattatttgtgtttgcattcatgtgaaaatttgaaattctcattaacatttaaagattcttacatagattgcttgtaattttaaccctgaagttgtgtcaagtgactttacaatgtcaatttgttttatttatttatttatttatttatttatttatttttgtgataggatctggctctgttgctaaggctggagtgcagtgttgcaaatacggctcactgcaacctctgtctcccgggttcaagccatcctcccacctcagcctcccaagtagttggaactactggtgcgccccacagtgcctgcctagtttttttgtattttcagtagatgtggagttttgccatgttgatcttgaactcatggcctcgagtgatccaccccacttaggcctcctaacatgctggtgttacaggtgtgagccactgtgtccagcccgaaaatgtcagtttcgtgccatgattaatagctaactacattttgggaatgtaataaaatttcattctataatgaagtctttgtaaaactcattagttgtggtatgaggcttgtcggcaatataagtgaacgtggtttatttttattaactgtatcagaactttagaatgttggtctcctgaaaccattgccttgagaggctttattgaacagtgttgccaatgatcagtttttttttaaatttccttttttttgagactgagtcttaccctgttggccaggttggagtatagtggtatggtcatggctcactgcagcctcaacatcctgggctcaagcagtcctcctacctcagtctcccgagtagctggaactacaggtgtatgccaccatgcctggcttttgtatattttgtagagacagggtttagccatgttgcccaggctggtctcaaactcttaaattcaaatgatccacccacctagttttcccaaagtgctttaattacatgtgtgaggcaccgtggctggccaggtcaaatatttttcattgacgtttttcatattgctttttaaagtcatgttaaaatattcttaataatttttctaagtggaattaatcttgattataattttagttttttataaagggcgggttttgaaacaagtactgcatttttcttttcgggtttataaacatttgctgtggactttgtgcagttaactattttcattcctgaaacacatttcgaaatcaggaattgaagactaaatgtcttttcactgaagcttgagcagattttagaaaggggagttcttttttttttttttttttttggtagaaatgggggtcttgttatgttgcccaggctggcctccaacttctgggcttaaactgtcctcctgctttagcctctggtctggagagttctttatggcctctttgagaacttttactttacacatgattctatctagctttcttttctgatgtacatattggcagcaagtagaaaagcaatgttttcagaggcagatatattaacagcaatgagaaataacagtagcgtgatagaaagttgaaagacttagctgggtgcggtggctcacgcttgtaatcccagcactttgggaggccaaggagggtggatcacttgaggtcaggagttcgagaccagtctggccaacatggtgaaaccctgtctctactgaaaaacagaaaaagggccgggcgtggtggctcacccctgtaatcccagcactttgggaggttgaggagggcggattacaaggtcaagagattgagaccattctggccaacagggtgaaaccccatctctactaaaaatacaaaaaaattaaatgggcgtggtgatgtgtgcctgtagtcccagctactcgggaggctgaggcaggagaattgcttgaacccgggaggcagaggttgcagtgagccgagatcgggccactgcactgacgacagagggagactccgtctaaaaaaaaaaaaaaaaaaaaaaaaccagacttggggctgggcgggcgcctgtaatcccagctacttgggaggctgaggcaggagaatcgcttgaacccgggaggtgaaggttgcagtgagctcagattgtgccactgtgccccagcctgggccacagagcagagtgagactctgtctcaaaaaaaaaaaaaaagtttggaagactggtggctgggcatggtggctcacacctgtaatcccaacactttgggaggctgaagcaggcagattacctgagcccaggagttcaagtccagcctgggcaacacagggaaaccccatctcaacaaaaaatattaatacaaaaaatttagccagtcatggtcgtgcacttctgtagtctcagctacttgggaggctgaggcaggtggttcacttaagtctggatgtcgaggtgagccatgattgcaccactgcactccagcctgggcgttaaaatgagaccttatctcaaaaaaacaaagcaaagagcctgggaactactaaaatgggaactactaaaaaacagacacaagagctcaacaagtataccattctgggaggtttttttttttttttttttttttttttttgagatggagttttgctcttgtcacccaggctggagtgcaatggcgccatctctgctcactgtagttccgcctcccaggttcaagcagttctcctgcctgactcctgagtagctgggagtacagatattggtcacacaccgggttaatttttgtatttttagtagagacggggtttccccattttggccaggctggtctcgaactcctgacctcaggtgatccgcctgcttcagcctcccaaagtgccgggaccacaggcgtgagccaccgcacctggctttttttttttgacatagaatcttgttctgttgcccaggctggagtgcaatggtacaatcttggcccactgcaacctctgcctcccagcttctagcgattttcctgcctctgactcctgagtagctgggattacgggtgcccgccaccacacccggataatttttgtatttttagtagagatggggttttgccatattggccaggccggtcttgaactcctgacctcagatgatccacctgcctaggcctcccaaagtgccgggattacaggcgtgagccaccactcccggcctgggagttttgactgtaagtttatagctgtatatcttaggccctaagggcattactgttttatagcacagtgtagttagttaatgtgctcataatggtgactcataacaccaggttaaatgattttttatatctcccaaagaagtatttttcaatctgcagatcatgaccccttagtagattgtgaaacacattagtggattatgacaagcatttttagaaaaatgaaaaagaataagaagtgttaggatgcattgcattattgaaataattgtttttgagatggagtttcgctcttagttgccgaggctggagtgcaatggcccgatctgcctcccgggttcaagtgattctcctacctcagcctcctgagtagctgggattacagacatgctccaccatgcctggctaattttgtatttagttttagtagagatggggtttctccatgttggtcaggctggtcttgaactcctgacctcaggtgatccacttgcctcggcctcccaaagtgctggggatacaggcatgaacccctgtgcccggcctaatttttgtatttttagtagagatggggtttcaccatgttggccaggatagtcttgatctcttgacctcgtaatctgcccacctcgactcccaaagtgctgggattacaggtgtgagccactgcacccagctgccaagaattgttttaagctttggtttgagttaatgtatatataccgcattgtaattcaaaatgtaatttttggccaactctgggcacattgcctatggactagtcctgctctgccacgagcagcaacagttcaatgaattttttttttttttttttttttttttttttttttgagacagggtctctgtcaccaaggctagaatgtagtggtgcagtctcggctcactgcaacctctgtttcctgggctcaagcgatcctcccacctcagcctcctgagtagctgggagtacaggagcacgctaccatgcctggctaatttttgtattttttgaagagatgaggttttgccatgttgttcaggctagtcttgaactctggagctcagatgatccacccaccttggtgtccagaaatgctgggattacagggatgagccaccgtgcctagccaaaaatttttttttaagtaattttttattgatatagtcaaaaaagttactgctttagagccagagaaacgcagtaaaaggattgagaaagagttttgaggttatatctaagctagggttgtcagatttggcaaatagaaatacaggacactcagttaaatttgaatttttgatgaacattgaccagttttttagtataattgtgtattaaattgcatagaaaaaagttatttatctaaagttgaaatttaactgagcatcttgtattttatctggcaactccagtctaagctggaatcatggttcactgttttttttttttttttttttttttgagtcggagtcttgctgtgttgcccaggctggagtgcaatggtgcgatcttggctcactgcaacctccacctcctgtgttcaagtgattctcctgcctcagcctcctgaatagttgggattacaggcacccaccaccatgcccagctaatttttatatttttagtagagacggggttttcgccatgttgttcaggctggtcttgaactcctgacctcaggtggtccgcccacctgggcctcccaacgtgctgggattacaggcatgatctaccgtgcctggccatggttcactcttcagtaactaaaatttaagctctatgaaagcaggaactttgttttgttcactattgattgtatccctatttcttgaatggttggcacttaactgcttggtcacatgtttgaatgggcaagttactcagccactctcaggcttagtttatttacctattaaaagagaaagaatatcttccttggctgggcgcggtggctcacgcctataatcccagcactttgggaggctgaggcgggtggatcacgaggtcaggagatcgagaccaacctgggcaacattgtgaaacctcatctctactaaaatagaaaaaattagctgggcatggtggtgcgcatctgtagtcccagctactcgagaggctgaggcaggggaatcgcttgaacccaggaggtggaggttgcagtgagccaagattgtgccactgcactccagcctgggcgacagaacgagactctgtctccaaaaaaaaaaaaaaaacaaacaaaaaaaaaaactgagatactggccgggcgcggtggctcgtgcctgtaatcccagcactttggaaggccgaggcgggtggatcacgaggtcaggagatcgagaccgtcctgcctaacatggggaaaccctgtctctactaaaaatacaaaaaattagccaggcgtggtggcgggcgcctgtaatcccagctacttgggaggctgaggcaggagaatggcgtgaacccgggaggcagagcttgcagtgagcggagatggtgccactgcactccagcctgctgggcgacagagcgagactccgtctcaaacaaacaaacaaacaaacaaaaaaactgagatactaaagtcttaatattttctgtttttatgtatttattttttgagatgggatcttgctgtattgcccaggttggagtacagtattgtgatcatggcttattgcagcctttaactcctgggttcaagtgatcctcccacctcagcctcctgagtagctgggaccacaggcacatgcaacatcacaccctgcagttctttttttttttttgagacaccgtctcgctttgtcacccaggctgcagtgcgtggtgcaatttctgctcactctaacctccacctcccgagttcaagcagttctgcctcagcctcctgagtagcttgggaccacatgtgtgtgccatcatgcctggttaattttttgtatttttagtagtgacagggtcttaccatgttgcccaggttggtctcaaactcctgagctcaagtgatctgcccgccttcgcctcccaaagtgtctgcgccctacaatttaaaaaaatttttgtagagacagtctcactgttacccgggctggttttgaacttctgccctcaagtactcctcttgccttggcctcccaaagtattgaaattaaggccatgaggcagcacacccagcctaaattcttcttatgttctgttcttggcacatagtagatgttcaacaatgtagagtcaaacgcatttggagttggaatggctctggtgttttttttttttttttaaaccagaaacacgtgcagtttattgaatgccattgtagaaaagtgtgtgaggataaacggctgatagagaacttggctctgggggcagggcgaggaatggagggtggatggagtacatgggaatcagatcacgggcagagctcctggcctagataatgcctcctgatctgttgatagacttgaaagatcaacactgggatgatgctgagcagaatggtcgtaatgatgcgcacaatcagggcccagatgttcaggcacttggcggtaaaggcataggcctgggccctgatcaggtcgccaaccatcttcttgtccctagacttcacggagtaggccaatgctatgaagcccaggcagcaggagttcatgaagtgggtgttgaacagggaccagacgacatggtcgggcacggagttctcgctgtggatggggatcacggtggacattgggggagcagggttgtggggtgcccccagcacagccacctcttgctcctccttgagcatctcatagttagggggatggccgatgttggcaggagtgaagaggtttggacattgtggttcatggtgtccagggaagaccagctgtggtcgggttgctggggtggttctcagtgggcccctccctttccctggtagtttggatttctctggctctggtggttttttagtactcattctatttacgggtgaagaaattgagaccaagagggttatttaccagagtatctcatcattggctgcataactggcattagaatctgatgtacttttatttctaatacatttctttttttttttttttttttgagatggagtctcgctctgttgccgagcctagagtgcagtggggcaatcttggctccttgcaacctccacctcctgggttcaagctattcctgtctcagcctcccaagtagctgggactacaggcacctgccaccacagccggctaggttttgtattttagtagagatggggtagcaccatgttggccaggctggtctcgaactcatgacctcaggtgatccacctgcctcggcctcccagtgctgggattataggcatgagccaccatgcctggcctttctttgtcgtttcctttctttctcttcatccctcctctccttttttcccctccccgctgcctcctcctgtcttcccttctttccttcctttctctcctttttattttttcctttctttttctttctctgtctctcccaacccttcctctctccctccctccctccccttctctctccccccctccctccccttctctctccccctccccttttgttcctaagagacagggtctccttatgttgctgaggctgaccttgaactcctgagcccagatgattctgcctccttagtagctgggactacacccacctcccgttccgttgtcatcttttttttttttttcttttttggagacagaatcttcctctgttgctcagggtggagtgtagtggcacgatcatagcttactgtaactgtgtaacctcgaattcttgggctcaagcaatcatcccatcatcccacctcagcttgctgagtacctggggctacaggtgtgtaccaccatgtccggctaattacttttcttatttttaatttttcggagataggatcttgctctgttgcccaggctggtgtcaaactcctgggctcaagtgaaactcttgccttggcctcccaaagtgttgggagggattacaggcatgagccactgcacccagcctcctctttcttcccatttaactcctaaccacaccgaactttctgtctgcagagaggagcattggtcagcagttcacaaaatggctaggtgtgatggcgtgcacccatagtcccagctacttggggagctgaggtgggaggatcgctggagcccaggagttcaaggccctgggcaacacagcaagaccttatctctggctgggcccagtggctcacgcctgtaatcccagcactttgggaggctgaggtgggtggatcacctgaggtcaggagttcgagaccagcctggccaacatggtgagaccctgtgtctactaaaagtacaaaaattagccaggcacggtggcgcgctcctgtaatcccagctactcgggggggctgagacaggagaatcacttgaacccaggaggaggaggttgcagtgaaccaagaacacgccactgcactccagcctgggtgacatagtgagactcttatctcaaaaaaaaaaaaaaaaggtcgtctgtactattgcatgttagtagtttctttctgcttattgttgagtagtagtctattgtatgcatgtaccagtttgttcatctagtggtggacattgagttagcaggttttggctattaaaaataaagctggaggccgggtgcgatgtctcacgcctgtaatcccagcattttggaaggccgaggcaggcggatcacctaaggttgggagtttgagaccagcctgaccaacatggagaaaccccatctctactaaaaatacaaaattagccaggcgtggtggcgcatgcctgtaatcctagctactcaggaggctgaggcaggagaatcgcttgaacccgggaggcagaggttgtggtgagccaagattgcaccattgcactccagcctgggcatcaagagtgaaactccgtctcaaaaaaataaataaataaagctggtatgaatatttatgtacaggttttgtgtgaacatatgattttatttctcttggttggaatgcatagaaatgagattgctgggttttgtggcaagtgtttatttttccagggtacatataatcctgtgagtgtttatttaattttaaaagtaattgctaaactgtttgctaaagtgactgctatattttctttccctagcagtgtatgaatttttttttgaggcagggtcttgctctgtcacccagggtggagtgcagtggtgcgatattgtctgactgcaacattgacctcctgggctcaagtgatcctcctgcctcagcctcctggctgggaccacaggcatgtaccaccacacctggtagtttgctttgatttttagtagagaagaggtctcactatgttgccctgggtggtgttgaactcctgggctcaagtgattcatctacctcagcctcccaaagtgctgggattatagatatgagcccctgtgcctggcctcattgtggttttaatttgcatttccctaatgcccagtgatattgagcattttttcatgtgtttatttgacattcataccatctttggtgatgagaaactatgtttatgcattgcttaatgatggggatgtgttttgagaaattttttcggtgatcttatcattgtacaaatatagagtttacttacacaagcctagatggtatacctactagacacataggctgtcgtacagagtattactcttaggctacaaatctgtatagcatgttgcggtactgaacactgttggcagatgtaacataatgttaagtatttgtgaatctaaacatatctaaacatagaaaaggtgagtaaaaatacagcgtaaaagataaaagtggtatatctgaataggtcacttaccatgaatggagcttgcaggacaggaagttgcttgggatgagtcatttatcagtggtgtgtgaatgtgcaggcctaggacattactgtatgctactgtagacaaacactgaacagttaggatacactaaattgataaatatctttcttattttgttttttgagatggagtctcgctctatcgcccaggctggagtgtagtggcgtgatgttggctcactgcagtctctgccttctgggttcaagcgattctcctgcctcaacctcctgaatagctgggattacaggtgcgtgccaccacacctggctaatttttgtatttttagtagagacgggggtttcaccatgttggccaggctggtctcgaactcctgacctcaggtgatccacccgccgtggcctcccaaagtgctgggattacagatgtgagccaccgcacctggccagagatgaggtcttgctgtattgcccagggcgttgaactcctgggctccagcaatcctcccacctcagcttcccacgtagctgggactgtgggtgcacgccatcatgcctagccgttttgtgaactgttgaccaatgctcttttctgcagacagaaagttcactgtggttaggagttaagacttttaacctctgacctcaagtgatctgcccaccttgacctcccaaagtgctgggattacaggtgtgagccatcacgcctggtcaaaaatatctttctttaagagtaaatttaccttaacttactggttgatcattgtatataggtctgttgttaattgaaacatgcgggccgggcccggtggctcatgcctgtaatcccagcactttgggaggccgaggcgggtggatcacaaggtcaggagatcgagaccatcctggctaacacggtgaaaccccgtctctactaaaaatactaaaaattaaccgggtgtggtggcgggcgcctgtaatcccagctactcgggaggctgaggcaggagaatggcgtgaacccgggaggcggagcttgcagtgagccgagatcgtgccactgcactccagcctgggcaacagagcgagactctgtctcaaaataaataaataaataaataaataattgaaacatgcggtgcatgtgtttatttgcgatctgacttgtttggaaatatttgcattatcttccttctagatttagagcatcttgacagtaggaacaagtgttttgtacaactttgtatgcttagtaagttatcaattaacttgtcgtggccaggcgcagtggctcacgactgtaatcccagcactttgggaggccgaggcgggcagatcacctgaggtcaggagttcgagaccagcgtggccaacgtggtgaaaccctgggtttgtttgtttgtttatttatttatttattttttggagacggagtctcgctctgtcgcccaggctggagtgcagtggcgtgatctcggctcactgcaacctccgactcccaggttcatgccattctcctgcctcagcctcccaagtagctgggactacaggagcccgccaccatgcctggctaatttttttatttttagtagagatggggtttcgccgtgttatctgggatggtctcgaactcctgactttgtgatccgcccgcctcggcctcccaaagttctgggattacaggcgtgagccaccacacctggcctaccctgtgtttattacaaatacacaaattggccatttgtgcgtggctcatctacagtctcagtgactcagaaggctgaggcaggagaatctcttgaacccgggaggcagaggttgcagtgagcagagatcgtgccactgtacttcagcctgggtgacagagtgagactgtgtctcaaaataataataataatttgttgaatatgtgactgttggtttaatttttatttttatgagatggagtctcactctgttgcccaggttggagtacagtggcgtgcagtggcgcaatcttagctcactgcaacctccgcctcctgtgttcaggtgattcagcctcccaagtacctgagactacagacgtgcactaccgtgcctgactaatttttgtatttttagtagaaatggggtttcaccatgttggtcagcctggtctcaaactcctattctcaagtgatccgcctacctcgaccttccaaagtggcggaattataggtgtgagccgtggtgcccggccagactattggtttggtttggtgtgatgttatgttatgttatgttatgttatgttatgttatgttatgttatgttattttaagacagagtttgtctcttgtcgcccaggctggagtgcagcggcatgatctcggcttactgcaacctccgcctcccaggttcaagtgattctcctgtcttagcctcccaagtagctgggattacaggcgcccaccaccgtgcctggctaatttttgtatttttagtagagacagggtttcaccatcttggccaggctgttctggaactcctgacctcatgatccacccgccttggcctcccaaagtgctgggattacaggcgtgagccactgcgcctggctgactattggttttattattaagcagtagtagttgaccctgtcatgtagaaagcatggcatttataggcataccacgtttaatttcctcccctttttttatttttggagtacctcctgcttgtgaggcttgggaatacagtagtgaataagccagatgaggtctctctctttttggagcttatgtggtagtatagactaggcagaaagttctcattgcccctgccaccttatggcattgaggtgtttgagatgctgatgtttacttctgtctcataaaatcttgaaaggagttcttttagatgaagaggaaaacaaaatcagaagaatgggcctgggtcatgtctgtaaacctccccacgtcatggggaggctgaaatgggaagggccaggagttcaagaccaggctgagaaacataacaagaccccatctctacaaaaaatattttttaattaatgggggatggcagcacacacctgtagtcgcagctactacgaggctgaagcgagaggattgcttgagctcaggagttaaagattgcaggagctatgatcacagcactgcgctccagcccctcttatcagcagtctggtatgttgctaagggtcttgttctttttagtgcttcagggacagccactggctatgcccagaaataagtatgtttgagaagctttctgacctcagcttgaaaaattgattagggtcataattaaaaagggagggaaacaggattgagtgaaccggacgctaccgtgagtttattctcccagggcatacataatctcatgtgattaccacatagccctgttagataatctgttatcctgtcctcattttacccatgaggaaatgaaggcccagagaggttaaatgacctattcaaattcactcagaaggtggcagagatgagttactatcattgtattttggatctctggaaagaaagaaaactagtgatggtattaaaaaatgttattaatagtttcttttaatcaaccaggaacttgagtcactagcttctctgggtgaaggactatacttcaacagtatgaaaaacggaaaagaaaatgaggaattttggctgggcacagtggctcacacctgtaattctagcactttgggaagccaagggaggagggtcgcttgagctcaggaattcaagatcagcctaggcaacatagtgaggccccatctctacaaaaataaattagctgggcatggtggtgcatgcgtatagtctcagctacttgggaggctgactcaggagggtcacttaaacccaggaattggaggttgcagtgagctatgattgcgccactgtataccatcccaggcgacagagtgagaccctatccccccaccgccaaaaaaaagaaaagaaaatgaggaatttacatttgtgacagatacggaattcagggaatttagttgttcatagtctataaatgctataagaagtctccatacctttttttttttttttttttttttttggagacagagtcttgctctgtcgcccaggctggagtgcagtggtgcgatcttggctcactacaagctctgcctctcgggttcacgccattctcctgcctccacctcccgagtagctgggactacaggtgcccgccaccacgcccggctaatttttttgtatttttggtagagatgaggtttcactgtgttagccacagatcccgacctcatgatctgtctgcctcagcctcccaaagtgctgggattgcaggcttgaatcaccgcacccggccggaagtctccatactttttaacccaatctaaaatggtaaggaaatatataagaatgtctatttattattaaattttttctatataaaacatttcagaaaataaagactagcatttctgagccaagtggtagtagtggccattttttctggaaaaaaaaaaaaaaagaaagaaaaaacacatttagctatctatgatgtgaaaagatgaacattttatttaggtaataaatgttatgtcataaaataccatttattgtgtgcctattaggtttcaggagagctgtgccaagagcattacttgtatatcttttaagccttacaacagcccagcctgtcaggctggtagtgccatatctgttttacagatgaggaagtgatggattggagaaattaaggaaattgcctttaggtcaaagagataggaagtgacaaagctgagatttttaaccttgtgagatttcaaagtctttgctttttaataactgttccattgcttctaatatagagatatgacaaaaacaagtaaaaatcagtgaagaaggctgggagcagtcgcttatgcctgtaatcccagcagtttgggaggccgaggcgtgtggatcgcctgaggtcaggaatttgagaccagcctggccaacatgacaaaactccgtctctactaaaaatacaaaaaagttagccaggcgtggtgacaagcacctgtaatcccagctactcagtaggctgaggcaaggagaatcgcttgaacctgggaggtggaggttgcagtgagctgagatcgctccattgcactccagcgtaggcaacaaagcaagactccgtctcaaaaaataaataaataaataaataaaaataataacaataatgaagaaaacaatccggtgattattgtcagcaataaaatttcttcaatcaaccatgctttagtcctggcagttctctatcagtgagtttcaatcaaaaagtttgtttataatttttttttttttaaaattttgaaatttggaaacaacatcataaatgatggttagttttctgcagctccctattttggcagatagtctgttgttactcataattaatttgaactaaaaagtagtgttgtacgatatcatgggctgtgaatgtgtttgtgacttgatctgagaacccacacaccacttaggatgcttctgtaggaaaattagagtatggaactcacttgcccacgctttccctgtctcagtccatgttggtaggctgcaaagtctggggctagaaggacactgaacaagacttcagcagtacatgttagtcttccagagggaaggaatataatagttgagagaataattcctttcctctgtgactttaggcaaattcttggctatgctgttatttatttgggccaaacaatatcaggaggttgtacattttattcttaattactgcgatacattaattttatccatgggtttaacctagcctaccttttgctgttagacttcaactctacttgtgttgggttacccctctgcttaaaaatcaccctattcccaagcctgagggagtctaccttcaaagctttctatgacctaatccaaggcctgtcaaacttcgtaaagggccagatagtaaatttgttttttttttttgagatggagttttgctcttgtcacccaggctggagtgcaatggtgccatcttggctcactgcaacctctgcctcccaggttcaagtgattctcctgcctcagcctctcaagtagctggggttataggcatgtgccaccacgctcggctaatttctttgtatttagtagagatgggggtttcaccattttggtcaggctggtctcgaactcctgacctcaggtgatccacctgctgcggcctcccaaagtgctgggattaccagtgtgaaccaccgtgcccagcccgatagtaaatattttaggctttgcagtccatatacagtcccatttttttgtgtatgtttgcacgttttctttacatattttaaaagcccctttttttttttttttgagacagagtcttgctgtgttgctcaggctggagtgcagtggtgcaatcttggctcactgcaacctctgcctcctgggttcaggcgattctcctgtctcagcttcccgagtaactgggattacaggcacatgctgccacgcccagctaatttttgtatttttagtaaagatggggtttcgccacattggccaggctggtctcctgatctcaggtgatctgcccacctctgcctcccaaagtgctgggattacaggtgtgagccaccgtgcctgacctaaaagctctttacagtgtaaaaaatattctgagctttaagccatgtgaaaataggccatgggcatttgctgacccctaatagaactccattttacctttctgatcatgtttcccattaactcttcaaaaatatgacctccatttaaatcaagatggtctccttcctcactgcttgtggaggtccagtgcccagtgtctgcctcttgcttgctcctccatcattgttctgccattcgagatcctcatacttaccctttaagatctagcccaaattttccatgaaactaattctaataattaaaaacttcctgtagaacttaactttgtctagtacaagttagctttcttattcagtagtagcttactataaattacaagaataaaaagattaccattttccctcacactgttttgtggagaatgcctaaagttactttttctttttacaggtcagtattcctatttggcatcctaatcccctttcccaaatctgaattttgggatttgaagcttgcatttgagattatgatttgtcttccttgttgtacacaggagcagggactttacaattagtattcgcatccctgctccttcatacttcgtgatgtaaggcaagttattttcacttatgcttaagtttcttcccctgtaaaaaggggatggaagaggattaaatgaattaaacatgtaacacgcttaaagcaatgcctggcaagtaataagtgctcagtaacttttagctgttcttattagcatgtttggaaaccagtagaaactacaccagcaagttaaggttgaaaagtggtattgatgggcttggggtagtacagtatgaatggctacagtttagcgtttcattaagtttgtatattcattaattcattacacatttgatgctgtcagactaggacagagacaaagatgaatgaaacattatctctgcttccaggttacccagtgtagtagagaaggcaggcatgcagatagtttaaattggtagcactgggaggggactgccatgggtgggcagtgaagaaaaagggcttcaaaataatgagagttgagatggatcttcaaggaagataagcagttttcagtaaggccatgaagagaggaggaagttccaggcgggaagagtttgtgctaaagtacagggattgctatacacatggtgtatgtagaaaaaatttggttcacagtgtgatagaagaattggagggggtcctcactgaaagtaaggaaacacatttggaagaatatgtttcagttagaaaatgaaatgagcttaaagtaaacgctaataaggtttttaaaatgtaaaatttcaacgtatttagaaagagaacagctggatgaatcttatgtacctgtcactcagctttagcagttatcagtaaatggccaacgttgtttcagctatactcccctctcctccactgatagtcttttgaaggggaatacaattgttttgtggcctccagaaagggataagtttatgagcaacgggtagatcgttgggagagacttgagtttcctgtcaggaagcattcttggtgcataagtcagaggtgatatgaatgccgtggaagggggtggcttactgtctggagaactcgagaagatgggaatgggcactgtccagtattgtggctacttccacacatggttctttaaatttaaaattatgttgattaaaatttaaatatttcagttcctcagccatactaatcgtatttcaagtgcttagctgccacatgtgcctaatggctgcaatattggacagcatgacataggacatcttcatcattgtacaaagttctcttggacagcatgggactagagccctaagatccttttctacctgagttgtttggattttttggtgtgtctaggttggatctagttgttcatggcttcatgaccaagccttttatccctttctctagagggactcaaggggtaaaggcactgaaggggtaaaacttcatatgaagagtgtggtggtggtggtggtgttttaagacagggtctcgctctgtcactcaggctggagtccagtggcatgatcctggctcactgcagcctcgacttcctgggcttaagtgatcctcccacctcagctcccaagtaactggaactgtaggcatgagccaccacacctgcctaatttttaaaactttctgtagagacgagatttcgccatgttgtccaggctggtctcaaattcctggactcaccttggcctcccagagtgctgggattgcaggtgtgggccactgcgactggccttttttttctcctttactactctagtgtatgctggaatatgaggaaataattatattagctagcagttattaaacacttaataacataccaggcactgttttaagctatgcgatctgtatggaatattacttaatttccacaaccttatgaaaagatactattttttttcttttgagaaggtactattttcatcttcatttcatagatgttgaaattgaaacacagagagctgaagtcacaggattaaggccacagagctgagaagtgatggagccggaatttgaacccaagcaattaatgctgatattagttcttgtgtgaatggtaattgttttgaaacaatgatcctagatgattatatgaccggattaatctggcagttgttctgtgtgaatttagagttgccttcccacctcagtttcctaaaaacaaaacaaaacaaaacaaaacaaaaaaaactctagcttcactgtgtttgggttgtcatggcctaccccctcttgccacctcatttgactcaactttttagggagaaaatattcaatacgtggtataggatttccctttctaataataatgtaaacaacaacaagaagtctgaaattggaagaacaaaatgactcacctaagtgagttaaccttaagaggtggaacttgatttctagattttagttaattgtctaactgatgtactaaatattagttacttaagtattaaaacgggtagacataatagttggggagctgctgtagagggggtagtttgagaaggcttctttcaggaggtgacatttaagttggtaactaacaagaaaggggcagccatgtgaatagctggagggaagagcattcttacagttttactggaagggggttagaggtatgtggtacccttatgccaaagaaaattagttacttctatacaaccagtctgattctagaaacctggatcaatgaaatattttgattatataaaaaaatctgttacccaggtcttgttgaaatagcattagaaactactgaaggacatatagaggaggagtgttgaaaaatggtgatggatgagcagaatggtgaaaaataaaaagacatgaagctctataattatattgtatggtgacagtaccaatagagattgcatgttttttctccccagtttttttttttgttttgttttttgtttttgagacagagtctcactgtgtcactcaggctggagtgcattgtcgtgatattggcttactgcaacctctgcttcctgggttcaagcgattctcctgcctcagcctcctgagtagctgggattacaggcatgtgccaccacgcccggctaatttttgtatttttatttgagaggggatttcaccatgttggcaaggctggtcttgagttcctgacctcagataatccacctgcctcagcctcccaaagtgccgggattacaggtgtgagccactgcgcccggcctcccccagttgttgaaacaataatggaaggtaattttattcttagattatttaatgtttttcagttatcaggatgtgttagattgtttgtgtatattgttttgcttgttaattaagtaacacagtgaataagacagacaaacatacgaaaatgtacatttattttatttttttgagacagtctgttgcccaggctggagtgcagtggcccaatctcggcccactgcaacctctgcctcctgagttgaagcgattctcttgtgtcagcctcatgagtagctggggccatgggtgcacgccaccatacccggctaatttttatatttttagtagagatggggtttcaccatattggccaggctggtctcgaattcctgacctcaggtgatctgcccgccttggtctcccaaagtgctgggactacaggcatgagccactgtgccaggccatttcatttttggaacgttcttttttttttttgaaatggggtctcgctctgtctcccaggctggagtgcagtggctcaatctcagcttactgcaacctctgccttccgggttcaagtgattctcctgcctcagcctcctgagtatctgggactacaggtgcatgccaccacgccaggctaatttttgtatttttagtagagacggggtttcaccatattggtgaggctggtcttgaactcctggcttcgtgatctgcccgcctcaacttcgcaaagtgctgggattacaagtgtgagccaccacgcccggcctgtttctggaatattcataatcttttgttgtcatttcaacagtgctcacagcagcttcaccaggtgtagattccatcttaagaaaccactttctttgcttatccatgagaagcaacacctcatctattcaagttttatcatgagattgcagcaattcagttacatcttctgaccccacttctaattttagttctcttgcttttttaccacatctgcagttacttgctctactgaagtcctgaacccctcaaaatcattcatgagtattagaagcaatttcctggttgggcacggtggctcatgcctgtaatcccagtactttgggaggccaaggagggcggatcacctgaagtcaggagttcaagaccagtctggcaaacgtggtgaaaccccgtttctactaaaaatacaaaaattagcggggatgtggtggcgggcgcctataatcccagctacttgggagactgaggcaggagaatcgcttgaacctgggaggtggaggttgcagtgagttgagattgtgcccttgcactccagcctgggcaacaggagcgaaactctatcttaaaaaaaaaaaaaaagaaaagcaatttcctctaaaactcctgttaatgttgatgttttaacctcctcccatgctcatggatggcattctcagtggcatctagaatggtgaatactttttagaaagttttcaatttattttgccatcagagaatggctatgaatggcagtagtagccttacagaatgtatttctttttttttttttctttttttttgagatggagttttttttgctcttgtcacccaggctggagtgcagtggcatgctatctcggctcaccgcaacctccgcctcccgggttcaagcaattctcctgcctcagcctcctgagtagctgggattacaggcatgcaccaccatgcccacctaattttgtatttttagtagaggcggggtttctccatgttggtcaggctggtcttgaactcccgatctcaggtgatctgcctgcctcggccttccgaagtgttgagattacaggcgtgagccaccgcgcccggccgtatttcttaaataaaatggcttaaacgtcaaaattatcccttgatccctgggctatggactgattcttgtgttagcagttatgaaaacatttatgtccttgtacattcccatcatagctttttgtcaatgagaagtaattttttttttttttttgagacagaatctcactctgtttcccagcgtggagtgcagtggcatgatctcagctcagtgcatcctacaactctgaggttcaagcaattctcgtgcctcagcttactgagtagctgggattacaggcgcccaccaccacgtctggctaatttttgtatttttagtagagatggggtttcacgatgttggccaggctgggctcgaactcctggcttcaagtgatccacctgccttggcctcccaaagtgctgggattgtaggtgtgagccactatgcctggcctaattggcctaatttcaatattgttatatctcagggaatagagaggcacgaggagaaagagagacaagctgactgctggttcgtggagtagtcataacacacaacatttattaagattgctgtcttatatggaccgtttgtggtgccttaaaagaaatcagggtaacatcaacgattactgattacagattactataacagatacaataataattgtaaattattatttacaattgtaaaatacaatcttttctttattatttacaattattgtaaaatacaatctgattacagattactataacgtatacaataatagtggaaaagtttgaaaatattgtgagatttatgagaatgtgacacaggcgcaaagagagcacatgttactggaaatacggcactaatggacttgcccgactcggggtttccacagacggtcagcttgtcaaaaatgcagcatctgtgaatttcaataaagcaaagcagaataaaatgaggtatgcatgtattgccatcacatgtacactagtaaaatacgttttttttttcagtaggtggatcaacctcaaattttaatataaagcattacttaaaggagaatatggggacattcatgacatttcttatatgtacataaaacttcatgaaaataatttaatgctatccagcagtttattttagaagtactggaggctaggcatggtgtcttatgcctgtaatcccagcactttgggaggctgaggtaggaggatcacttgagttcaggagctggagaccagcttgggcaatatagtgcgaccccatctctacaaaagagaaaagaagtactggagtgttgcagctcttacagaatttgtctagcaggttttccagtctttaccagaaatgcccccatgcagaagtagtaaatactgattcatgtaaaataataaacaactttatctttcagtttttaaaagacagggtcttgtaacgttgcccagactggcctttaattcctgggctcaagcgatcctctcacctgagccttttgagtagctgagactacaggctgcacctctgcacctggctctgcttgatttttaattgttgtattgctgttgcagctatgtttttttttttcttcagtgtgaggatgggcaaactttttatgtaaagtctcaggtaataagtattttaggctctagggccatatagcttctctgttgcatatcctttttttttttttccatttcccctcaaattccttttaccataagcaactcttgaggaacataaaaatcattcttagcccagaagccagaccaaaacaggttgtgggctgtagtgtcctgacccctgatttaaagattgatagctttgaaatggaaagttttaactttctttttttttctttcccttgttctgattgggctgttaattcattaggtatttactcagtgtgtatcatatgaggcatgattcctctgctaattttggtagtggtagaaagatacttttgccaagcttggttgttaggttttcatttgtccaagagttcctgaccaagtgtgaatggatgttgaaatcaaggtgtttctttggccacacaatgtgcctttgggggctatatctatgtgcttctggtaccttcttttaattttcacaaagacactgcttgccgaccacactgttttgtctaatgtggggctatgaccccctggaagaggcatcattttctgattttcacagaagcataatatggtcaggtgatggtcctgagtagtgggtatatgacagatacactagtaattataatacagatctaaactggagagttgaaaacagcatcgtatatttgattgagataatcgaaggaagacttcctgaaaagatggcatttgagtttcaaggctgagtaggattaagtattattatttaaaaaatgccttggacaatgcattaaatagagttaacaaatcacatcacttatagtctccaattaaaaacattttacttaaacataattttagacttttagaaaaattgcaaagatattataaagaattctcctatatatctcacctgtattcttcaagtaacattttaccatattcaccttaacattttctctgtattggtaattgtatatgtaagatttaatataaaataaaaattcttattaaacatatgagagacatgatgcctctttagccctaaatacttcaacttgtatgtactaataacaagggcattctatttcaaaaccacagtacagttgtcaaaataaggaaattaataattgtgtcaaactgttattctgtttatagaccttctaatgtcctttaaaacaatcaacaaatcaacatttttctggtcaagaaccagtaaatatgtatattctacatatatatatacacatatatatacacacatatattctacatatatatgtggaatatacgtatttactccctctgtccaagaaccaatccaggattgttaccttcggttatcatgtatctttggtctcctttaatccaaagcagtttctttgtcttttatgacttgacacttttgaagattacaggttattttgtagactgtccctcaactagggtttatctgaggtttccttatgattagattcagatatttatttttggcaggaatacaacagaaatgatttgtgtgtttttctcattgcatgatatcagaaagtgcattgtatatatttatcccattactggggttgttaactttgatcacttggttagagttgtgtctactaagtttcttcactataaagttatttttcacttggtcatttcatcagtatcttgtggggagttactttgtggttatataaatactctgtttctactttcccttactatatttagcttctgtggacacttttgcctgaaacagttatttactatggtgttaccaagtagtgatgcccttttcttccatcattctgtctacatttttttttttttttttttttttttgagatggagtttcgctcttattgcccaggctggagtgcggtggcctgatcttggctcactgcaacctctgcctcccgggttcaagcagttctcctgcgtcagcctcccgagtagctgggattacagacatgcgccaccactcctggctaattttgtatgttcagtagagacaggatttttccatgttggtcaggctggtctccaactcccgacctcaggtgatccacccacctcagcctcccagagtgctaggattacaggcgtgagctgccacaccaggccttctttttctcttttaagagatagagtcctgctttgtcaccaaggctggagtgcagtggcatgatgatagttcactgcagcctcaaactcctgggctcaagtgaacctcccatctgtagctgggactacaggcacctgcataacacctgactgttttttaaaactattttagagatggggtcttgcgaagttgctcaggatggtcttgaactccgggtcttaagtggtccttctgcctcagcctctggattagttggcattacaggcatgagccattgtacctggcaagtgcatattttctttttttttttttaaggtggagtctcgaggccgggcgcagtggctcacacctgtaatcccagcactttggaaggccgaggtgggtggatcaagaggtcaggagatcgagaccatcctggctaacatggtgaaaccctgtctctactaaaaatacaaaaaattaactgggcatggtggcacacgcctgtagtcccagctactcgggaggctgaggcaggagaattgcttgaacccaggaggtggaggttgcagtgagtcaagatcatgccactgcactccagcctgagcgacagaggtagactctgtctcaaaaaaaacagaaagacggagtcttgctctgtcacccaggctgcattgcagtggcatgaactccgcctcctgagttcaagcaattcttgtgcctcagcctcccaagtagctgggattacagacatgtgccaccacacgtggctaatttttatagttttagtagaggtggagtttcaccatgttggctaggctggtcttgaactcctgacttcaggtgatccacccgccttggcctcttgaagtggtgggattatgagtgtgagccactgtgcccagccaagtgagtatttgcttatgtagtattttaattttatgatttttttttctttgagacggaggtttgctcttgttgcccaagctggagtacagtggtgccatctcggctcactgcagcctccacctcctgggttcaagccgttctcctccctcagccacctcctcctgaatagttgggattataggcgcctgccaccatgcctggctaattttttgtatatctagtagtgatggagtttgagcatgttgccaggctggtcttgaacctctgacctcaggtgatccacctgccttggcctcccaaagtgctgggattaaggcatgagccaccatgcccggccagagactgttcatttattttttttttttgaggcggagtctcgctgtattgcccaggctggagtgcagtggcacaatctcggctcactgcaagctccgcctcccaagttcacaccattgtcctgccttagcctcctgagtagctgggactacaggtgcctgccaccacgcctggctaattttgtttttgtatttttagtagagatggggtttcagcccgccttggcctcctggagtgctgggattacaggcgtgagtcagggcgcctggccaatcataccttcttttactgcattaattatggttttctttcgttcttaaaacatgtttatagtgaccacttttgaaattcttattaagtcagacatctggttatacaagcaatttctattgcctacttctttttccagtgggtggggttatactttcctgtgtcttagcttgtcgtttttttttttgttgttgaaaactggacattttaagtaatgtagtaactctggatacctcattagcctatggttgggggtggtggttgttactgttatttgcttatttgtctaatgactggctgaatgattttagtgttctatccttcttccctccctgtacagtgtgacacgtctgatgctagttttcttgggatgcagccttgggtatgcctaccatcactctagaatcacagtgattttggcatggctttgtctcttttcctgactgtacccagctgttaagctacactaattactaggtgatgctgtgtagtcatttcttggtgtccttgggggattggtcccaggacccccccgttggatataaaaatttatggatgctctagtccctcataaaatggcacagtatttgcatataccggtgcacatcctcctgtatgctttgtcatttctagattacttataatacctaatatggtgtaaacactaggtaaatagttgttatatattttttatttgtcttatttttattgtatttatttttaagtgtttttaatctcgagtgattgaatctgaggatgtgaaatctgcagatatggagggcctgcattgttttccgtggagctttgggcctaaactgctccacagactgatctgatcaaatttgcgcttctttgaagggatagtttctgagatcagtgtttgaaatttgttccaatccacagaggagtcctcccagctctctttccctagttctggccaccaaactagacaactacaatttagcacttatctccaatgattctcctcctaccaagtgcctttgaaagcatcattaactctttcataccttgttgcaaatgaaatttctttgggaagagattgtgagttttttttctcctaaattatggtgcaatataagtaatataccattttaacaattttaagtgtattaagtgttttttttttttgtagtttttttttttttgttttttgagatagtcttgctctgtcgcccaggctggagtgcagtggcacgatctcggctcactggaacctccacttcccgggttcaagtgattctctggtctcagcctccccaaatatctgggattacaggtgtgcaccaccacgcctggctaatttttctatttttagtagaaacggggtttcaccatattggtcaggctggtcttgaacttctgagctcgtgatccacccacctcggcctcccaaagtgctgggattacaggccttagccaccacacctggcctatgcattgcttttatatgtattttaaaattcataagttctcctcctatgatgtttttgtcccatgtgatttatttgttaaaccgtcatctttggccgggcgtggtagctcacgcctgtaatcccagcactttgggaggctgaggtgggtggatcacaaggttaagagatcaagaccatcctggccaacatggtgaaaccccgtctctactaagaatacaaaaattatctgggcatggtgacgcgtacctgtagtcctagctacctgggaggcggaggttgcagtgagccaagatcgtgccactgcactccagcctggcgacagagtgagactctgtctcagaaaaaaaaaaaaacaaaaaactgtcattttttatgttgcatttactgcattctggatttaaactgtgaggaacctcatggtatcagttaatatattcttccatcttaatgtttctcgtaaactggtagatctgtaaacttgattaggtctatcctattgtatcacatcagaagcagaaggtgcttttttttttttttaagggaaattgtgtgaaagtagacagaatggtaaagtgaacccctgcacacctatcacccagctttaatagttatcagctcataccattcttgtttgatttacaaccccattcatttctcccttctgtattattattatttagttaattattttttgagacagggttttgctctgtcaccaatgctggagtgcagtggcataatcacagctcactgctgtcttgacctcctgggctcaagtgatcctcccacctcaccctaccaagtagcggggaccacaggcgtgtgccaccatgcctggctagttttttattttttgtagaaacagggttttgctttgttgcccagactgatctcaaactccggcactcaagtgatcctcctgcctcagcctcctaaagtgctgggattacaagcatgagctaccacattcagcatgtaaatttctttatattaatttgactggcattttaagtcacacttgaatttcatatttggcaactattaaaagcatagagtcctggatattagtgttttgttaaacctgatctatctaatcataaatatacttaggtctaaaatatgctcttggcctttgtttattgcggttcagtatttgttactatattaaatagtaaaatatttggtttgagatactaatgaaaagattaaaagtaaagcataacttgaatggatacaaaaagaaacaagaatttagacttcagtggatttcagagaatactgcttcgatatgctaacattcctgttgggtgtccaaccgtgtcatagatcagtggaaattagtggtttctgcactttactgtactgtttttttatatgataatattttcctggttgaatgattcgttcttttgagtaaactccatggtcaaacaattactttttattagtcaaagatgtaaccacataatcactaaaaagaacagtgtgacttatttaaaggggattatgtttttaagtcttttatatagctttgtagggaggccatatgagtttaaggacagttcgtggcatttgttcaaggttttgtaacttggcatctcagcagccaccaggataccagatcatcgttctaagtaagatttaggcattttagccttcatgtacagactataagtacacccccccacacccctaccaaaactgtaaattcaaatgatgtttgaaaaagcatagaatttttgttaggcgaggtagtttattccttgtgatacagttccagagaggcagcataacctaggaatgaaaaacttagacgtggaatcagatacacctggtttaaataccagctctactgctcatgaactggatgattttggtcaagatacttgactgctgaggttcagtttcctcacctgtaaagtagaggtgatagattagacatgttgcatgtgaagtacttagtatggtgtctggttttgtagtaagatctataaaagataaattattagtcatattccttagacttcaggaatttatctctgtgccatgtttgaggcaaacagttacagaattagaatgttagaaatgaaaggaatcctagatgtcatttaattcaagtccattgttttctggatgagagaagaaagtgaggaaaagtgacagagttggagaccaagctaggactggcctcagaatgttaagagtactcttctagggatcgaccagtcgtgttactagactttttggatctgaattgtgcttttccttgaatgttttgaattttggcttgagtgttgtgattattttattaaaatgagattccagtcctattgtcatgactaatgtttatgagaaatataacatttcactttaatgatgttttttaattattctaaggggcctaatctttttcagtggaataagctttaggttgtattatattctataattcacttgaaaatagaattcatctttacttgacagccaaattttgtgtactgcatcttttctgagggagagagttggcaaggaaaggcacttgttacaacgatccacacatatagacgcatattatttagaaatgaaagtgctttgaatgatttagcttattttcagtttttttttttctgcagttgtaatcatatgacctgtttttctttctttttttttttttgagacagagtcttgctctgtcaccccggctggagtacaatggggcggtctcagctcactgcaacctccacctcccaggttcaggcgattcttctgcctcagcctccctagtagctgggactacaggcgcatgccaccacacctggctaatttttttattcttagtagagatggggtttcactgtgttagccaggatggtctcgaactcctgaccttgtgatctgcccacctctgcctcccaaagtgctgggattacaggcatgagccactgcgcccggcccatatgacctgtttttcttttatagatgggggagaaatatgggaagtgacttggtgtcagtcatctgtgttggttaaatcaagaatataatccgtgttttgcttctgaatagctctttataacagtgattggttactttgggagtaaagattattatttagagacagagtcttgctttgtcgcccaggctagactgcagtggaatgatcgtagcctactgcagcctcagactcctggactctggtgatcctgcctcagcctcctgagtagctaggactagaggtgcatgccacatgcctggctataattattattaatttacgtttagcattagtttttttcttccagtaggctattttactttatttatttgattttgatgaagtttgattatttctagtttgcttccttctatgacccctacctgttgtgggtctccaggcaagcagtgcataggtagagccatccttaggtagcctttagacttaatattaggtgagctctccccacagatagcctctcctttatttgaatggaattatattttaagtttggaaatatttttcagcttatttagcctgttgaatttaataaaaataatatttaatcttttcagaggtcgaaacagtaacaaaggactgcctcagtctacggtgagtaactttaatgttacttattggggaaaattagtagctaaaacatgatctctaaccacagaccaaatgccaaggcaaaagattcccttcttttgaattttgtcatagataacttgactgtttaagtatgttattagcctatatgtgtttttttaatgactctgtataaaatgtacaattacttgttgtattagtccattcttacactgctaataaagatatacctaagactgggtaatttataaaggaaagaggtttaattgactcatgctctgcattgctggggaggcctcaggaaacttacaatcatggtggaaggggaagcaaacacatccttcttcacatagcgacaggagagagaagtgctgagcaaagcagggaaagccccttataaaaccatcagatctcctgagaactcactcactatcatgagagcagcgtaggggaaactgcccccatgattcagttatctccacctggtcttgcccttgacacacgagaattattataattaaagataagatttgggtggggacacagaaccaaaccatatcatttgtaaatagtatttttgtcacgtgtaataacaagaacaagtcgcttgttcttttctaaatgactaagtgcaaatctaagtgaaaaacctccaaaagatacgtagaacaccaagagtggagtctgcagagttctttatgctttttattttgaattaatgtgctttttttctgctgctttcatttttctcctttggctttctggtcttaaattttggaatgttatcaatgaaattgaaccggacatgaagggcagaaactataagtcccacatgatggaagaaataaatgagaagctatcacaaatttttgagactttgcctttattagattgttttacaagaatcaggaagatatacacgtatatggtagtaatatggagtagtgtggttgatcagacttaagcactgtcactgatgctgatatgctgggagaacctagtcagggttcttctatgaaggtatgacctggcttcctaccccatttatttatacttcacccttcttagggtacatttctgtgagttttaacaattgcatacaatcagtgtaactaccaccacaatcaagttaatagaacagtttcattgcccaccaaaatccctcaaatcacttttcagtgaaccctcctctctctccaaccattgatttgtcttccatccttacggtttgtgtccttcctcctctatggaagtttactcttgcttttttatgtcatgtttagtcaaaacaccattagttggtttgactgataacacttgaaaacctgaccttctgttccttctgttctctatggaagcaaaatattaaataaacaaaatcttcccttaatacatgtaagatatcataaacctaactaaacattttgcaacaaataataaacgttagctttatatgcaaatgtaaatacaggctgagcatccctaatcggaaatgctccaaaatttcatattttgaattagggatgttcaagcactaagtataatgcaaatatccccaaatccgaaaaaaatccgcagtctaaaatacttctggtcccaagcattttagatgaggaagattcagtttgtactaatttctaatagttttttttttttttaatattccagatttcttttgatggaatctatgcaaatatgaggatggttcatatacttacatcagttgttgtaagttattagattattggggataaactgccttgggggtagaataaagtaattccatgaagttaaaatgtggataaatgattgtcaaagtaacattgcttagatcatgtttagtcaggatgatttagagaaatagattagaactccttttatccagtctaatataattcattgtaaaagtacagttggtcctctgcatctgtgggttccatattcatggattcagccaaccttggatcaaaaatatttgttaaaaaggccaggcacagtgactcacgcctgtaatcccagcactttgggagtttgaggtgggcagatggcttgagctcacaagtttaagaccagcctgggcaacatggcagaactccgtctctacaaaaagtaaaaaaactagccgaacgtggtggtacgtgcctgtagtcctagtgacttgggaggctgacgtgggaggattgtttgagcctgggaggtggaggtttcactgagctgagataatgcccctgcactcagcctggtcaacagtgccagacagaccccttctcaaaaaaaaaaattttttttttttttttttttttttttttttttgagaaaaaagaggcatggttgcgtctgaaccaaagatgtacggacgtttttcttgtcattattcctaaaacaatacagtatgacaatttacatagcatttacattatattaggtattacaagtaatttagggatagtttaaagtatttgggagaatgtgcttagttatatgcaaatactattacattttatgtaagtgacttaagtattatgtaattcggtatctgaaggaggtcctggaaccagtcccctaccaataacaacagatagctgtattcttgttaaccctgctgtgtgtgtaaaataatgttagtagttgattgtcttttgtacattattttgtcacttaaaatagctggggtcagaaatgtttgacttcagtattaaaattcgtactgcaaactctgagtagagcctcctgaagaatttcaagagttcagtgtattgttaatgttttgaaatttttttattgttttgttagtgaatacctaatattgaatgaagcctgatgaggtataaaaagtaaaatgaaaacaaatatccctggtgaccgggtagtatactgtttctttgataaataaattatatgtttttagggctccaaatgtgaagtacaagtgaaaaatggaggtatatatgaaggagtttttaaaacttacagtccgaaggtaatttttactttttttctttttcttacaaagtaaaagaacattttcatagtcagtgttttacctagtttttaaagccactttgaatgattttacttctcagtttcaaatactgattattttatagactggtttgtgtaatcagagaggcttcttgatgtgtgtgcttattaaaatatttcaaccatttttaagcattgtgagctaatagagggatgtggtggtttgttttttcctcttaaaaattattattaatgtacttaagacaaaccatagaaacaaaaaacatttagatatgaggatttttaaatgatggaatggataatagatcatatgcctgggaaaaagggtatgattctcttgagattatttttgtcaaaggcatataagaactggtaccttgatgagctaaagaattcctaacaaattttattttgtaaaggtttggagtacttacttgtgtttttcattttagtgtgatttggtacttgatgccgcacatgagaaaagtacagaatccagttcggggccgaaacgtgaagaaataatggagagtattttgttcaaatgttcagactttgttgtggtacagtttaaagatatggactccagttatgcaaaaagaggtgggttttgatttcctaaatatgcctcatggtttattagatttattcaagcaaagattttcacagtgatcttacaaactttttttaaagaaatatctgggctgggtatggcggctcattcctgtaatcttagcacttagggaggctgaggcgggtggatcacctgaggtcaggagttcgagaccagcctggccaacatggcgaaaccccgtctctactaaaaatacaaaaatttatttttgtgtgtggtggcgtgcgcctatagtcctagctactagggaggctgagacagaattgcttgaacccaggaggcagaggttgcagtgagctgataccgcaccactgcactccagcctgggtgacagagcaagactccgtttcaaaaaaaaaaagaaagaaaaaagaaatatctactttctagaatagcccaagtaaggtaattttttagaaaaatgagaatgttaatgcatttttgttggaaaacaattagaactttagagaaaaattaaatagagtttttgtgatctcttaaaaaattagtttgtaaagcattttctacagttttgtggtcaagaatgctactgattatattcaactgaaaatttcttgtcccatttggcctacaatgctttagtttataagtgggcatgtggcaaatctggaaagaaatcaaagtataaggctaaggaagaaaggtagagaacggttggtagaaaacaattgtctaatgaaaatgaaaaagggtgaagaagtagaacatacgtattttaaaaatattcagagtatgagacaaggttttgagaatttaaaagcgattatgtagttatattaaaaatttagtctctttttaagtgtccattgatgaacaaagtgggaattcctgttactcatttgcaaggcattattgagtgttcagtaacacgttgcaaggcacttctgggcaatcctgaacttggttctcaaattctttttttttttttttttgagacggagtcttgttctgtcccctgggtggagtgcagtggcacgatctcggctcactgcagcctctgcctcccaggttcaagcgattctcctgcctcagcctcctgagtagctgggactacaggcgtgtgccaccacaccaagctaatttttgtattttttgtagagacagggtttcaccatgttggccaggatggtctcgattgtttgacctcgtgatccgcccgcctcggcctcccaaagtgctggaattacaggcatgagccactgcacccagccggttctaaaattcttttatttatttgtatatgccaaattctgtagtgaaatacgtaattctgttgtaaattgtagttcagtacaatttgattttcactattcaaatctataccaaaagctgtttttattgttgggctgattcttctacactgttacttggaaataataatataccaggattctttctcttagacttaggagtctttctctttgcttgctttttcagaggctaacagtactgggtattctttaactgtcttgatatgctgatgaaagcacagtgttctgtttttgaatcttctcaaatgtccttgtctttgattcacaactttttgtcttaagaggccttcagcatcccatacaaggaaacaagtctttttttagctgctacctttggagttgattttgtttatgtctaggagcactaaattatttatacttatactattgaaatattcctctgttataaattcaaaaattgactttggaagataaaattttagttgaatttaatacatagcactctggaaagagtattggccacaacaaaaaaaaaggttccctactctattggataccaggtcatttaacagccatttacggtatgcattgtctttttgtttttatgatgaattgatatttcccaaatgtggaagagtgaatattactttgagatgtttgtgatagtccattccttgctcctcttcaaaattaatgtcattaaatttttattactttattagatcttcatttctcagataattttagttcattatagaaaggcaagaaaatacagatcagagtgacaactttgaaaatctcactctactcataaggggatgggtgtattttgctatatattacaaaattagttttcttgatgaggacatccactattggagtaatttcaggtatcttattttttcttttctctctctttttttttttttttttggagacggagtttcgctctgttgcccaggctggagtgcagtggcctgatctcggctcaccgcaacctctgcctcctgggttcaagcgattctcttgcctcagcctcccgagtagctggttactgaggcatgtgccaccatgcccggctaatttttgtatttttagtagagacggggtttcactatgttggccaggctggtcttgaactcctgaccttgtgatcctcctgccttggcctcccagagtgctgggattataggcgtgagccaccacgcctgggcaggtatcttatttcaaaacttacagtggtttagtgaattatacaattgcgtccagtgcgtagtatcctgaaaatagtattaagtcatgtgtttaggacatcaggtctcttaagctaagactatccaggcagaaattgccctcttctataaaagaagaaaagtattaattaggaagtactatcagtatggagaaaaccattttagaattattaattggcatggtttccttctttttttttttatttcgagatggagtctcactctatttcccaggctggagtgcagtggtgcgatctcggctcactgcaacctctgcctcctgggtttaagcgattctcctgcctcagcctcccgagtagctgggattataggcacataccaccatgccctgctaatttttttttttgtttgtattcttagtacagactgggtttcaccatgttggccaggccgcatggttttccttaataacaaaattaaggcatttattactgcatctagattttttttattttttattagagacttactcagattactcccaaagtaaaggaaggtatggtttaatcaatgcttcttaatgctgggttcacgtttagtcacctggggagtttttaaaaatgttctcacttctagggatcctggtttaattataattagcctgggtgaggctctggacagtcagggtgtgagctatgggtttcatgtgatgagatcccaggagtggctctgttctgtggccttgagaatttgtgctttctaggccaggtgcggtggctcactcctgtaatctcactttgggagaccaaggtgggcagatcatttgaggtcaggagttcgagaccagcctggccaacatgttgaaaccccgtctttactaaaaaagtaaaaaattagcgggacgtgatggcacatgtctataatcccagctacttggggagaggctgaggcagaagaatcgcttgaacccgggaggcagagattgcgagatcatgccactgcactccagcctgggcaacagaataaaaaaagaatttgtgctttattttcttgcctcacagtcccctttctgtctcagaattggcaactgcctgaaatagtctctgctgttatcatttgatagtacttttccacatcttgaatggatagatagagtgttttttataatagaagtggatgaatgattagagtatactaatatgacattgtattttcctaaaagatatgaattgatttcatttctgagcttttataattctcttctgtaatagtctgtcaaattattaaggttgataatattaactaaaatttgagtgcatattctatgtgccagactctgtgctaacagatttacctacatttgttcacataatcatcacaagttgtttctgtagtagatacagctattatccacgtcatagatgaggaaacaggcatatttaggaaacttgctaaagtgaggacacaaatctagcttttctactctaactcatgttcttaacattatactgcagtgacataaattatgtggtttggtttgttgtttatctcagttgtcataagtcgaattaatgtttgtttgtttgttttgagacagagtcttgctctgtcgcccaggctgggtacagtggcgtgatcttggcgcactgcaacctccacctcctgggttcaagcagttatcttgcttcagcctccctaataactgggattacaggcacgtaccaccacacccgggtaatttttgtatttttagtagagatggggttttaccatgttggccaggctgatttcaagctcctgaccttaggtgatccacccacctgggcctcccaaattgctgggattgtaggcatgaaccactgtgcccagccagtaagttccatggttgttaaaggatttctccacaaataaagctaaaagtaaaaaaaaaaaaaaaaaaaaaaaattctcaagcaatataagatgcagactattatgttgttcaagttttttttttttttttttaatctttggctttatttttggggaaaccttttttttcttttttgttttccttgggacggagttttgctcttgtcgcccaggctggagtgcaatggtgcaatcttcgctcactgcaacctccgccttctgggttcaagcgattctcctatctcagcctcccgagtagctgggattacaggcatgtgccaccatgcccggctaactttgtatttttagtagagactgggtttctccacgttggtcaggctggtcttgaactcctgacctcaggtgatccacctgcctaggcctcccaaagtgctgggatcacaagcgtgagccaccgcgcccagccagggaaacctttattttgaggcggagtctcgctctgtcacccaggctggagtgcagtggcgtgatctcagctcactgcaacctctgcttcctaggttcaagcaattcttctgcctaagcctcccgaggagctgggattataggcgtctgccaccatgcccagctaatttttatatttttagtagagacggggtttcaccatattggccaggctcttctcaaattcctgacctcatgatccacccaccttggcctcccaaagtgctaggattacaggcgtgagccaccacactcggctgctggggaaaccttttaacatgagtaaggtcagtgtgacttttaagttcttgatgctaacatcattgatttcaataaagtttaaaagttatattcatgcatatatgcaaatgaataaaaggctttgaaatagtgacttcttacggtacagtgaataagtttcctttggtctcttgaatgttatacatgttccagtttgatttactgagaaactgaaagtacctttacgtcatatgagctgtgagtcaccttggcacattcataattagaagagaccatcagattatcattggaaaatcagtttgtatttatcctttatttgaattccagtgcagacagatctgaggttctcttcattttgctaaaacttcttagggccttcagtcgcttttggctctgtattcgtgtatctttggaattgtcctgttatctctgcttgttttttacttgattttccatccatttccagtattcctttctcctctatttttttccttcattttctttctgctcttcctgttgcgccattattcatgttttcctctttactccaactcaactatggctttacttctgtttccttattccattgttcctcatactttttcctactgcttcattttctttgcagtattctcagcctagatgataggggtcagcaaatctgctcatcagtaaataaattttattgtagcatagctatgcccatgcgtttgtgcattgtctatggctgttttgatggctgtagccatagagttgagtagttgtagctgactgtaggacttgcaaagccagaaaatttgactgtctctttacagaaaagtttgccagctcttggcctaaatcatattttccgctgcatttagggctttttaggactgatcaaaaatacatgctatactggctttggtgaagtaacagaatgtgctctgtcctttaaacttacaactaattgcatgctttgattctaatactgtataatatcctgcgattcttattcatgaccattctaattggatttagtctgaagaattacttttgcttaacagattctttgtcacatttagtgaaaaatcataaaaggggaaggttggttaatggaaaagatctccatcaactaaccactaccttccttatctacaaatttatcttcttcctccgtgccatctttttttttttttttttcagatgatcttgctctgttgcccaggctggagtgcagtgatgcaatcacagctcactgcagcctcgacttcccaggctcaggtgatcctctcacctcaacctcctacataactgggactgtatgtgcacatcactatgcctgactaattttttatatttatattttttgtagagatggggtttccctgtattgcacaggctggtctcaaactgctgggcctaagagtcttcccaccttggcctcccaaagtcctgggattacatgagtcaccgcacccggcctcattattatttttcctctggttttagtagagaggatttttaagccaacttcaatcatgcccttgactctctcccttctacttacctccttgttctctttttctttttctttttttttagatggagtctcggtctgtcacccaggctgaagtgcagtggcgtgatttcagctcactgcagcctcagcctcctgagtagctggggctataggtgcctgccaccacgcccggctaatttttgtatttttagtagagatggggtttcaccatgttggccaggctggtctcgaactcctgacctcaagtgatcacctgcctcagcctcccaaagtgctgggattacaggcgtgagccaccacgcctggccatctttttttttctccttgctcttttataccacttctctgtttctgggctcttcaacatctgcctttctagttaatctttccctttagcatgaaaacctattcacttcctgctcatcctaaaaaggattcttttttgttttgttttgtttttgtttttgagacagagtctcgctcttgcccaggctggagtgcagtggcactatcttggctcactgcaagctccgcctcccgggttcacgccattctcctgcctcagcctcccgagtagctgggactacaggcacctgccaccacgcccagctaaatttttgtatttttagtagagatggggtttcaccgtgttagctaggatggtctcgatctcctgaccttgtgatccatctgcctcggcctcccaaagtgctgggattacaggcatgagccaccgcactgggcccaaaaggattctttttaatcctgaattcttctagccattatcctgcctaaggctacgattaacctctaactgccaggtcctttggaatctttttctgtctttattgctgcacttgaatgttggtttcaccctccttcagaatttcctcttctgtattttttatgtttattgatcattccttccctgcctcattcctgggcttcttttccttcacacaccccttagatgtgtgtccccagtgtttgtttctttgcctgctgctcttgccacatgacacacactgccagctaccacacacaagttccctcctatcatgtgtgtatcattgcccttataccatgttgtattaaaattatatgcttgtctcccctgttacagtttgagctctttgtgctccaagtaaagacagtgatactgtctttattatttattctcatggtctagtatagtgctttggcacatagtacaggctcaatataaatgtgtttgaataaatgaaattcagtgccttaatacacttttgtagaagcattattttatggaaagaatgaaaaagctgtaagtggtcttacatatatagtcatccagcagatacttagagagctctgggatgtgttccttgctgtgcttgttgctatggacagtacggagaaatacaagaatctattttgggtcccttttgagaacctagtgaaactgtgtacctagtgaaactgtataccctcaccctagaaaaatttacacacatgtagattttacatgtaattcttttaaaaattaattttttttcttttttttaaagaaacagggtcatgctctgtcactcaggctggaatgcagtggtgtgatcatggcttactgtagcctcgacctcctggctcaagcgactctcccacctcagcctcccaagtagctggggctacaggtgcacgccgctatgcccggctaatttttaaaaatattttatagacactggttctcactatgtttcccaggctggcctttacctcctgggttcaagcaatcctctaccttggccttcaaaagtgatgggattataggtgcaagccactgtgcccacgctaatgtaatttcatggtgttcacagtttcttcagggagttcatatacgccatgtactctattctaagcatttttagagttagagatagcaaagcacgtgaataaattcaagaaaaatggaatgttgtactgcatgacattgaatatcaaatggagtcagcgatgcaaataattgtctagattttacaaaaaaaattagcctggtgtgctggtgtgcgcctctaatcccagctactcgggaggctgagacaggagaatcatttgaacccagaaggtggaggttgcaatgagctgagatcgtaccactgcactccagcctgagtgacagagcgagactccatctcaaaaataaaaaataaaagaattgtgtagattttagtagttggaagaagttggagtgttaatgtgtaattagagaacagtgagaaataaaattctacagattgttttattctggtgtgctgttgtgttctcatatggttgtctttttggtcttgatagtgtatcagtaacagagtacgagtaacaaacagggatctcttctgaacggcgtgacattagaaaagctgtttacggcctcaactttgctgtggtttattaagacacagatatgtgttcattctggggccaagcagtaactggagagtggcacttattgaggccagtatggaggcagtacagagattattgagattaaaagaaagaaacaggtggaacggatctatgtaatggaaagctaaacagaatagttcgtggtacacagtagaaaagcattacatgtttattaagatatggtcatcttccatttattaaagttacatgttttataatttttagagtatatagaaattctctaccctatcatgtttgccaaagtcagaacaataacttcatttattaaatataaaaaaaataaaaacctctagcataaaatagaattttatttggacaaacgataaaaaaatactgtgtggtactagtaagagtaaggttgattcaagatacatgggagcagaatccaaagtgtagaaataggccaggtgcagtggctcatgcctgtaatttcaacacttttggaggctgaggcgggaggatgagttcaggagttcaagactcgccttggcaacttggcaaaaccccatctctacaaaaagtacaaaaattagccgggtgtggtggtgtactcctgtaaacccagctacttggtgggctgaggtgagaggttcacttgcagccagtaagtcaaggctgcagtgagctgtggttatgccacggcactccagctgggtgacaagcaagaccttgtctcaaaaacaaaccagccaggcgtggcggatcacctgaggtaaggagttggagaccagcctggccgacatggctctactaaaaatacaaaaattagctgggcgaggtgacgggcacctgtaatcccagctacttgggaggctgaggcaggagaatcgcttgaatccaggagacggagtttgcaatgagccgagatggtggtgctgcactccagcctgggtgacagagccagactctgtctcaaaaacaaaaataagcataggacatggggataaattgaagatttatgaagacacagctgaaggagacataaaagtagatttggctaaatggaaacatgccatactttgaatggaattatttaatactacaacgttgtcaattttcctcaaataaatctctaaagataatatattcagttttggccgggcacgttggctcacgcctgtaatcccagcactttggaaggctgaggtgggccgatcacttgaggacgggagtttgagaccagcctggccaacatggtgaaaccctgtctctactaaaaatacaaaaatcatctggacatggtggcaggtaccagctacttgggaagctgaggcaggagaattactcgaaccccgtaggtggaggttgcagtgagctgagattgcactccagccgggtgactccatctcaaaaaaaaaaaaatttttataatatatatatatatatccgtttttgtagaaattgacaaaatgattctaaagcttattagattatgtgtattaacagaagaactttggaaatttttttccacaagagtcataaaggaggacttgccctacaaaatatgtcagaattaaaacataacttgtcagctgggtgcggtggctcacgcctataattccagcactttgggaggctgaggcaggcagatcatgaccagcctgaccaacatggagaaaccccgtctctactaaaaatacaaaattagccggtcatggtggcgcatacctgtagtcccagctactcgggaggctgaggcaggagaatcgcttgaactcgggaggtggaggttgcagtgagccgagatcgcgccattgcactccagcctgggcaacaagagtaaaactctgtttcaaaaaaaaaaaaaaaaaaaaaagaattataactgtcacagtggctacgtatggagcatccaaaactgaatttatgtgggtattttattaatatgcaatatagcactttaattctggaggaaaggtggattattcagtaaatgattctgggacattggggacaaattagatacctacttcacactgataaataaaaccaaatagattaatgagaaaactgtgattaaacaaaacaacacccagactacactggagcaaatctgtgaatttgtttaattttgagtggagaaggactttataagcatgactaccagagcaaaaaaatcatgaagtaaaagatcgatacctttgattataaagagattaaagatttaggccgggtgtggtgctcacgcttgtaatcccagcactttgggaggccaaagcgggtggatcacttgaggtcaggagtttgagaccaacctggtcaacctggtgaaaccccatctctactaaaaatacaaaaaaattagtcaggcatggtagcacatgcctgtaatcccagctactcaggaggctaaggcaggagaattgcttgaatttgggaagtggaggttgcagtgagccgagattgtgccacatcactccagcttgggcgacagagtgactccatctcaaaaaaaaaaaaaaaaaagacttagacgtgtccaaaagtaccatacatttaaaaagacatgccacaaactgggaaaagtagaaaaatagttttaaaaatgaccagtgaatgtatgaaaaggtggccctcctcacttgtaatgatttaagaaatgcagtttatttttattttattgtatttttaaagaaattcagttttaaagcagtggaatatgattgtctatcagcttgcgctgaatggtaaatgtgagaaagattactactacttagtggtactgagggagttgcaaaacacttaacactgctagtgggatggtttaagtaaaacaagtagcattcttaaactctctattaggtaaagaataggtaagtaatgcatatgtttccaggacattttcagtaagactgtttactgatagggttgtgtaatgctaatatacttactatctagttttagtattatttttttctcttgtcttggatggtttcaatggagtcttatgcatgcagatatattaaaactagtaataaagcaagagaaggaatgtggataaattatctctaatttctattttgttctatttctatttcatactcctgggaaagaatattaagtgggcatgtgtacttgaacagttgttctgttttttattagaaaagaatccgaatctataaaatgttttacatatttgccagggaaacagaaaagatatttgtacagctgtaagaattggaattaatttcattttactgacttttccttaacctaattctgaacacttttgccataggtttgagaataagttgttataaaatgactactattcttcactaatagtattggcatttcaattcctaaattctgttttttgattcttgaacatttctgaatttactttttttgtcttagttcttctacagaatcattttcttcttttttctttttttatttttattttttatttttgagacagagtcttgctctgttgcccaggctggagtgcagtagcgcgatctcggctcactgcaagctccgcctcccgggttcatgccattttctcctgcctcagcctcccgggtagctgggactagaggtacccgccacagcgcccggctaattttttgtatttttagtagagacggggtttcaccgtgttagccaaggtggtctcaatctcctgacctcgtgatccatccgcctcggcctcccaaagtgctgggattacaggcatgagccatcgcacccggccttctttttttctttctctttaacttctgagctgaaaatagtaccttttataaagaagtgctcaaacgatgattggactgatttctccttatttctctctttctctctgtctctttcactctctttttagaatttttcttttttaagtagagacgaggtcccactatgttgcccaggctgtcttgaactcctgagcccaagcaatcctctttgcctcagcctcccaaagtgctcggattacaggcttaagctatcacaccaggcctaggctaatttcatattttgagatggcacaaatttctttcaggtagctagcttttcctcctcctccccacttaaaatagatcctgatccagaagcctaatggagaaaatgaaaacagaatgttcacccataaacagtatctttgtattggaatcttttctaaaacttcttttgatctttttaggagatagtgtgggaatcagcaatctagtattacgtacgtggaatctgtcaccttgtttttttaaatacagcaaacctcatgaagtgaatttccatattttttcttgttcttgttagttttgcaccactcaggctttgctgtagaatttgatgtatatttgattctgtagagcatgggctattgatcttcactcagctttcagaggaatctgattagtaagtttgagttttttattattttttagttgattttgaagtaaaatacagcaccattttaactgataccatttctaaacaattttcagttcaaattttaagttagctaatttagagcttaagaaaattgctttaaaaacataaaattactggctgggtacagtggctcattcctgtaatctcagcactttgggaggccaaggcagatgaattgcttgagcccagtagttcaagaccagcctgggcaatatggtggaaccccgtttctacaaaaaaaatacaaaaagtagccagacacggtggtatgtacctgtagtcccagctattcgggtggcagaggtgagaggatcatctgagcgcagggagattgaggctgcagtgagccaagtgagaccctggtttcaaaaaaaaaaaggttactaattgcagtgccttttatcttatttaatgggcttagtcaaactaagatgatgtattttatcttataaatgttttcccttgaattttaactgaagaatccaatttgtacctctcacaaacagaatgtattagtaaggaaaataaatactgctttttattacttaaataggatatatttttctcttagggattttttttctattttatctcactttatcgtagtgctagaaaatttaatcattcatttgagatagggagaaaattaggtttttttttttcttctattttgagacagggtctcattttgttgtccaggctggagtgcagtggcgccatcgtagctcaccataacctcaaactcatgggttcaggtgattcaccttagcctcctgattaagctgggactgcagatgtgtatcaccactcctggctaatttttgttgttattttttgtttgatgaggtctcattatgttgcccaggctggtctcaaactctgggcctcaaatgatcctcctgccccagcctcccaaagtgctgggattacaggcatgaacctctgctcccagcccattttttaaaatatattcacagcattgtgcaaccatcactacaatcaatttacattttcatcaccctgaaaagaaactctgaaccccttagcagttcctctctgtttgtttcaattttccccagctccaggcaactattgatttattgtcttcataggtttgcccattctggacattgcgtattaatggaatcatataatatatagcctttttttttcttttttttttttgaaacagagtctcactgtgtcgcccaggctggagcgcagtggcatgattgcagctcactgcatcctctgcctcccaggttgaagcgattctcctgcctcagcctcttgagtagctgggactataggcgcctgccaccacacctactaattttatatttttagtaaagacggggttgcaccatgttggccaggctggtctcgaattcctgacctcaagtgatctgcccacctcggactcccaaagtgctgggattgcagccatgagccaccgcatctggccatatatattatgataggcttgtttcacttagtatgtttcttccatgctgtagcatgtattagtacttctttctttttcatggccaaatattccattatacagttacacaggtacactacattttgtttattcatcagttggtggacattttcattgtttccaccttttgatttatacataatcctgctgcgaacagtgacttttaaagtttttgtgtgggccgggtgtggtggctcatgcctctgtaatcccagcactttgggaggctggggctggcagatcatttgaggccgggagttcgagaccagcctgcccaacatggtgaaaccctgtctctactaaaaatacaaaaatgagctgggtgtggtggcgtgcacctgtaatctcagctactagggaggctgaggcagagaatcacttgaagctgggaagccgaggctacagtgagccgagatcacgccactgcactccagcctgggtgacagagtgaaacttcatctcaaaaaaaaaaaaaaaaaaaaaaaactgcgtgtggacataggttttcaattctcatgggggtgtgtgtgtatgcatactcatacatacatacacatacctgcaagataattgctggctcgtatgctaaatctatgttgaaccttttacataactgttgggctgttttgttttctttttattattttttgaaaatagagttggggtctcactgttgcacaggctgatttcctgggcatagtggctgtatcattttacaatcctacatagctgtttccaacgtagctgtatcattttacaatcctactagcagtgtctgaggtttcttatgtttttcacatcctcaccagcatttgttattgtctgtctctttgattatacccatcctagtgggagagtaagaagtagtatctcactgtagattttttttttctgtttacaactttactttaaaaattatatatgcacacatggtaaaaagttcaaaacgtgtgtaccaaaagatttaacagtgaaaatagaaaataagtgtggtccttgttttcttccaccaaggcaaatattgttataatctcctaaacaacttgtcttccagatttctcattttcagtcaatcttgggcattgacataaagaaattcttagacattgcttttattagatcatctcatcccttgctcaaaatcttcagtggccactgttgtttacagaataaagttgggatgctatacagggcccttcccagtggaacttctctttttcaaccttatctctcattatttcccaatgtttttttttttttttttgagacggagtctcgctctgtcgcccaggctggagtgcagtggcgggatctcggctcactgcaagctccgcctcctgggttcacgccattctcctgcctcagcctcccaagtagctgggactacaggcgcccgccactacgcccggctaattttttgtatttttagtagagacggggtttcaccgttttagccgggatggtctcgatctcctgacctcgtgatccgcccacctcggcctcccaaagtgctgggattacaggcgtgagccaccgcgcccggcctatttcccaatgttaatctacttattgacctactaagctggcatgttctgtgtgttagacatcaccaactttgtgccttctttttttgtttgtttttgagttggagtctcactctgttgcccaggttggagtgcagtggcgcgatcttggctcaccacaacctctgcctcccgggttccagtgattctcctgcctgagcctcccgagaagctgagacgacaggcgcgcgccaccatgccctgctaacttttgtatttttagtagagatgggtttcactgtgtttcccaggctggtctcgaactcctgaccttgtgatccacctgccttgggctcccaaattgctgggattacaggcgtgagccaccgcggccccctgtgccttcttcttttactcctggatttaatcccaacgtgaagaatctaccttactaactagagttttagatactttttcaaaaccaagcccacatctgtcctttttagagtcttctctgaccttccctgctcattgtggtttgtttttattgcctgtaacaatggctgttaaactttacattttaaattaatttatgtttgtatgtatttatttgttgagaaagggtctctctctgtcacccctactagaatgcagtggcgccatcatggcttactgcttcctgggctcaagctgttctcccatttcagcctccccatgcaccaccctacctggctaatttttttgtttgttttttttagtttagtttttgtagagacagatgtctcactgtgttgcacaggctgatcttgaactcctgggctcacttgatcctcccatctcagcctccccaagtgctgggattacaggtgtgagtcaccatgcccagactttaacattttctttttagtatagaataggtcagtttttttccctctgatgagatcccatgctgactcttagttaaaacaaggctttggttggaagaagagctagtgatgtcctagctccctacttactccactttcccttgccttctggggtgtcctgaagacatcatagggtgtcatgaagtacagttggagaaccagtggtctccatcatgtaccaaacactcatcttcacgaagcagtatgtagtgtcttttttaccggtatattttctctctcccaatgcattaaacttttctggagttcagaaaacaaatttatagaattaaggaaatgcgtcccccccaaccatggtgtctagtatatatacagtgacttacagataacaggtgttcaacatatatatattcctttgattgatttttgaaaagtttacatgtatatattttttatatacggggtctcactctatcactgaggttggagtgtggtgatgcagatcttggctcaccgcaacctcctcctcccaggctcaagtgattctcccacctcagcctcccgagtacctgggaccacaggtgcgcatcaccatgcctggctaattttttatatttttggtagagacaggattttgccgtgttgcccaggttggtttcgaactcctgagctcaggcagtccacctgccttggcttcccaagtgtgagccaccactgaaatacttatatttttaaacttaatttatttatatttattatatttttatgtttttatattttaaaaaatatttttatactcactagacccaattttatactcctaaaccagggaataactgtttttttttctcttacataggcatgataccatagacaatgattaaaattgtaattaccattcatttcttagttttgtggctgggacactgatgtcttcaaatgttagtttgcaaatacagtcagccctctctatccatgggttacacagctgtgaattcaaccaaccatggatccaaaatatatgggaaatacgctggggctgtgggtcacacctgtaattccagcacttagggaggctgaggcagatggatcacctgaggtcaggagttcaagaccagcctggccaacatggcaaaaccctagctctactataagtacaaaaaattagctggccatggtagtgcacatgtgtaatcccagctactcgagaggttgagacaagcaatttgcttgaacctgagaagtagaggtttccatgagctgagattgtgtcactgcactccagcctgcgcaacagagtgtgagaagaaaagaaaaaaaactgtctgaaaagaaaaaaaaaaattatatgggaaatcaaaagcatctatactgaacatgtacagactttttttcttgtcattattccttaagcagtaccacaactatttccgtagcatttactttgtattaggtattataggtaacctagaggtttaaagtatgcgagagtatgcaaatactacaccactttgtatcagggacttaagcatccctggattttggtatccctagggggtattagaaccaatcccccatagatgctgaaggacaactgtagtgtgtgttggaataatttattttcaaatggatcatttggagaacactattctttaggaaacatagcctcctaagttctgttccatacatccctttcacctccacggcgttgtagcatcctgctttcatgactgtgtcatcactcggaaggaactgcttctcttccagaatgcttttcaagatctactctgaccacagctataaactttacacttctattctcttcttgcccctcacagtgttctctgttcctctaagatcttaaactctgtctactcctaatccagcctgctgggtgtggctggagaaagtcccactggggggctgattagttaggaatgtagggtttccagctcttgctggagcctcagaagagttcagcagacttttttttttttttttttccttaaacctatttctgcagccttgatgaccactccttccagtccctcacctatttgctttattcatggcagaggctctttcttcctgcttgtcagtacaaagaggcaggattcttcacctggatctgtggattctcaaagaatttgtggagagaattcagggcattgatgaccttggatgaagagaaatttacatctttatttacactaaccttcaagtgaaatttagcattttttgccatttaaaaatatgggcaacaaacaactagtagtattagcagtatttatgacttaagcacctatagaactcagttaatttcatatcgcttgatgttatgggtatctcaaattattattttatgtatatatatttttgagatggagtctcgctctgtctcccaggctgagtgcagtggtgcagtctcagcccattgcaacctctgcctcctgggttcaaacgattctcctgcctcagcctcctgagtagctgggattacaggcgcacaccaccacgcctagctaatgtttgtattttcagtagagaaggggtttcaccatattggccaggctggtcaccaactcctgacctcaagtgatccgcctgccttggcttccaaagtgctgggattacaggtgtgagccaccgcacccggcctcaaattatttttagaaacagaatcttgatatggtatccgctctggccttgaacttgtgggctcaggcagtcctcccacctcagcctcctgagtagctgggattataggcatgtgccactgcaccaggcttcaaattattatgtatgttcatcacctctttaaatttataatagttattaaacctgttactggatcttaatatttaatgctttaattaagaacatgtatgttactatgccaacagatttttttagtttttgataactgcatttcattgttacttgttctcatttgatttcctgtgtattttacgaatttaagtacattctgaatacggtttcataggcttccctaaaatattgaaggggcccatggattaagaaaaaggctaagaatccctaatctagaggctccccacagtcctcttttgtcatcatacccctaccccattctagcctgaggagcgtggctccacctgtgcccttggttttgttgttccagtccatacatcctgcacccttaactgtgtttcttatccccaacttgtttctttgtgttattcttcagtattatagtctttaatataatctgtataatacatggtgtagtagtatatgctcgtagtatacaattcagttagaacagatgagtattcaatgaaaagataatctcctctctaacccccagtcccacttccctggggaagcctgtgttcttgtgtacaattcagaaaatgtttatacacatattttttatttatttattttttgagacggagtctcgctctcgccaggttggagtgcagtggcgcaatcttggctcactacaacctccgcctccctagtagttcaagcaattcaaggttcaagcaattcgcctgcctcagcctcccgagtagctgggactataggcgtgtaccaccacgcctacctaatttttgtatttttagtagagacagggtttcaccatgttggccaggatggtctcgatctcttgacctcatgatccacccgcctcagcctcccaaagtgctgggattacagatgtgagccactgtgcccagcctgttgatttaattttaaacagagtttcgctcttgttacccaggctggagtgcaatggtgcgatctcggctcaccgcagcctctgcctcccaggttcaagtgattctcctgcttcagcctcccgagcagctgggattacaggcatgcaccaccatgcacagctatatttagtagagatgggggtttctccatgttggtcaggctggtctcgaactccggacctcaggtgatccgcccgcctcggcctcccaaagtgatgggattacaggcgtcagccactgcaccccgcctatacacatttttttgttttttgtttttttgagatggagtctcgctctgttgtccaggctggagtgcagtggcgcgatctctgctcactgcaagctctgcctccctggttcacaccattctcctgcctcagcctcccgagtagctgggattacaggcgccggccactacgcccatctaactttttgtatttttagtagagatggggtttcaccgtgttaaccaggatggtcttgatctcctgacctcgtgatctgcctgactgggcctcccaaaatgctgagattacaggcgtgagccaccgctcccagctatacacgtatttttaatgccactccagtctatgttggaaccattttacttcccctttcttattttcttcttgtgttcttgaaggcctagatcagctgttgctgataggctgtcactgtcactttagaaagcccagagccttttgttccttagaactttgtttttaattgtattgtagcactcattgtattcgattctaaaagatttgcttcatttctgtaactagtctcttacacccaggagctcctagttcctacaggaaatgctgggaattgtatcagtcaaatgtgaatccccacctcgtccagacttatgagtgcattgtaggtactcagtaagtgctaaaaatgactaaatagtcccactgataccaatctatatactgatactttatatagtatatagattggtccacatataacgatgacacataatgagaaactgtcttaaaaagttgttgaaagtgccgcaggaataggaattgatcaaaacaatatgattttttaggtttatatggaactttgatgtttgagaaaaggctgatttagttgagaagaaatggttagctgaggattttgatgacttctctggaagcacatttgagggtttgtgatgttaaatctgatgttaatgattatttcatccagttttatgtcattttatagtttttatacatttaagtatatttatttctaatgtttaacactaccattttagttatttgaccattattctggccctttaaaaaatgctcagacaagtttgaatgatttttcagaggcattattggctcagaggtaaaagaggaaagattgagaagctgaatatgtactctgtttcctgggtatggggctggggatacccagaagaggttcacacgttggtcgagacatttctttatgaccaccagcaggtggcatcaccggcccaaaatgactaagtttctgcccagaatcagaagagaaggtgttgagagcccactgctgtgggggtagcatggaggtgggatacaggggctggaggtgatacaattttgtttcttcctccaacatcgcctgctagtctagaggcttttataaattgaaaaactaattctttatcatctcatctgatggtttttatgtttttccttttttctctctatacctgtagttccttcagaaacaggtaacacttttctaatagtcacgttgtattcttgcatcttgttgttacaatgcttttgtttctcaccataggggatgatggaaaattaatattctttgacttatggcattggtaaaatctgcatgcaaattcccacagttgcctgtagattagagccagttgtttttttctcaactttgcaggaatcctggttacaacattgtactatttactaccaacagtgttttttttttttaaaatccagacttgctgggcatagtggctcatgcctgtaatctcagcgacttgggaggctgaggtgggaggattgcttgagcccagggctgcagtgattgcggcactacactccagcatgagtgacaaagaccccatctctgaaaaaacaaaaacaaaaacaaattttttttaaagaaacagaaacaaaaatccaaacttgtaaccactgtaaaacaaatcagaatttacgatagtggatattattaatagtgcagaatggatacccagatcttgcttcctttctagctaatgatgcaatgttggcctgaaatgcattacttatagccagggattttctcagcatcctgatgatatagcctcatttcgtgctaactctccacttctgcacatcttcccctaagtcctttactcatctttagaaagagctacttttggtgaaattttaaaaccaaggaatatcattctttatagaatcacacttctgtgttttccccttccccatttctgtctcgaaagcgacagactgctacataacctgtgaatacttttttttaaaaaaagtttggtattgtaaacagaagatttaagattaaaatgtagcattgagaaaaatagatttattaataatgccctcttaacacaacctaaattctggtcagtggaataaagcctgggtcctaaagttttagacgcttgcttgcttttccacactggctcttacttggggatccttttagaaatttgtttagaataatactgtaaaaacatatttaagctactttgtgtgtacatttgggatcttttggtttgaagacggcttgactcaagactttctaaatattttcacacacacacacataccctgtagtgagaaaaaaatccgtttatatggttctataaaaatctctagctgcttcgagctttaatttcttgaatcaaaagagtattgtttttaatactgagcttctatctaaataaatgctttatttacttaaatgtgtgcttttcaaaaactagtatgattaagacattaacaggatcttagacgtaaaggaacagtcctgttgcttcttccagaagataatatgactcgtttggaattttcctatagtgtagttttttgtctagtgttgtgagaattaaagggatttcaggatcttaaggtaggttattatttgatgttttcttggaacattttacattcttgaaaatacacatggctaaattaatttttgccagcaatccacataactttaagataatgtagagaagaacgtgattcaggttagtatcaaataaggtcagatttctagtgccatcagtagctttcagcaaagatgaggtgttggtaagatagcattagtctcttagaatctcttagagagattttccaaaattcagccatttctagtgaatgctccattccacccccagctgagtcctgctgctctggggaactccctcagcacactcttggctcttagaattgctagcaatgggagtagtgctgctggtggagctggcagctaagcccagaggtggattaatgcttttattccctgatgtacaggtacacacactcatacctacccacacctagtttgggataagaagaggttagaattagctaggcttgaagttccatgcttaaatttgctggctcagatttcttattttggcatcactttgcccattagggagacaatgacagttatagaagcattgccaaataaaaaatccatctggaataacctcttttgtaggagtattgtgtgtttagttgttgattcgtcccttcctcctcttagtggcaacttacagtactgggaaggaacagtggctgggagcttatattcctcagcagagccagatcagcagaagtattactccttagttcgtagtaggtggtaccctatgggtccagtcatttaaatgcaagcctgtatctacagagcgtttcctagtgccatcattgcccagtgggcctttatttagctgagtctaactcccaactagagaaaatttcctgtgccagacagcagtatggtcagctaacatgtggatgctacatttgctttcataagtcagtactcttcaataacattagtagaagagaagaggacacaaagtgagagtgtgttaataggaagtccaggtatgcctgctacctgaactttctgagacaggtaatactgtagggcctgaactttgtagcagagtggttatatatgaagaagtgggttctgggaggggttaaaccacttagaatggcttcatttactaatggcaagagtttgctgggatattgaccactgtacatagacatgaatatggaaagttaaaaacaaaatccacatatatttggctgcaagtactccgaaggtatatctaattagtgcatccattaaacaaaagagatattttaggccgggcatggttgctcacacctgtaatcccagcactttgggaggccaaggtgggtggatcacctgaggtcaggagttcgagaccagcctggccaacatggtgaaaccctgtctctgctaaaaatacaaacattagctgggcgtgttggtgggcgcctgtaatcttagctacttgggaggctgaggcaggagattcccttgaacctggaaggtggatgttgcagggagccgagatggtgtcactgcactccggtctgggtgaaagagcaagctccatctcaaaaaagaaaaaaaaaaaaagagatatttttgatggattgatagaaattttctttttctttttttttttgagacagggtctcactctgtcgccaggctggagcacagtggcgtgatctccattcattgcaacctccacctcccgggttcaaacgattctccttcctcagcctcccgagtagctgggactacaggcatgtgccaccatgcccaactaatttttgtatttttagtagagagagggtttcaccatgttggccaggatggtctcgatctcttaacctcatgatccacctgcctgggcctcccaaagtgctggtattacaggcatgagccaccacatctggccagaaattttcttggtcacttctgagacatgcagagtaattacctgtaatataatttaatgaattatgtcaatatattaaaatatgcttcatgtgggctgggcatggtggctcatgcctgtaatcccagcactttgggaggccaaggtgggggtatcactaggtcaggagatcaagaccagcctggctaacacggtgaaaccccgtctactaaaaatacaaaaaattatccgggcgtggtggtacacacctgtagtcccagctactcgggagactgaggcaggagaatcgcttgaacccgggaggcagaggttgcagtgagccgagatcacgccactgcattccagcctgggcaacagaacgagactctatctcaaaaaaaaaaaaaaaatgcttcgtgtggcttaaaattatatgaaaagaaaatacctttactgatagtcatctgtgattccatttgctaaattaaacgtgaaagcatacttttactgaatactatatattccgtatcagtttagatagcagtttatcttcacatacataagttttaagtttacctttattatagtgcattggtcttttgttttcatcaacctaaattatgttcaataaatgtttctgttagattttaagttaaacaattatgtgaaattcatttttcgtaattgttttttaacatatgtctttgttggtaattcacgtgtgtgagtgtaactgattgccagattatataaactttcaaccaaaaccattctttgcagatgcttttactgactctgctatcagtgctaaagtgaatggcgaacacaaagagaaggacctggagccctgggatgcaggtgaactcacagccaatgaggaacttgaggctttggaaaatgacgtagtaagtaacatctttgtaattattgctagactctggtcagtatgacatcctgtcacttggttgtaatttaaatgtgcttttgttgttgttgttattgtagtgagtgtatttagagcagcaggtttgttgtataactagagactttctcccaagcaatatataaagaaaaatgtttgtcattttacttgtaggggttaagcaggagtactgtctgttcttgtggatgctcatgaattacttctttgtgattaaaataaataataagaagtagcttaaattaaaattagaaaccatgggaaatgccggtgtgttttgctttaacacccagccaaataaggtagcctaaggaaagtggtgtcttaattgttgacttcacctagagaagaggttgaagtaggacattttaagcctcttgtctgaagaaaaggttgtcattaagataaataattaggttacattggaattaaagcattacataaatttcttggtcttaaatttggattattctccacaaaattcttttatttctaaaacgcctcttgtcacatactagttttgtttctctctttaatgcattatctgtacttgaagtgcttagctgggtatgctggcacatgcctgcagtcccagctacttgggaggctgaagcaggaggatcacttgagcccaggagttggagtccagcctgaatgacataaggagaccccttctctaagaaataaaaataaaaacaaatacttaataaagactctgtctttaggatagagagcatagagatataaagcaaagtgtcttgccaaaaatgagtgttatggtaccaatatttgagtagaatgaagaatcttccattgagtagaaagagaatttgtaacatatctgtgtttgatgtttaaggcataacagcttaataatgacactcttcctcagacaggaagcctgaaatgtcctactttgacctaaagtctagtaataaaactggacatacacaggcaacatgtcattaattctcaaactttaacaaatcatatataacctaatataatggttctcaagtctgtacatcacgtcacctgtatgaaaaatatgaggaaacagagacttcttttacactattggtgaggtggataaattgatagagtctttctggagagaatctggcaatgctaatcaaaatttaaaatgcacatacactttgttccagcagttctatctctagtaatttatttttgccctcatatatccataagacatgcaaataattatatgtgaagattttttttttttctttttctgcagagacagggttttaccatgttgcccagggtgatctggaactcctgagctcaggtaatccacccacctcagcctcccaaagtgctgggattacaggtgtgagccatcatgcctgaccaggatttttttttttttcagcattatttcttttgttgttgttgctgttgttttgagagatggagtctcactctgtcacccagactggagtgcagtggtgcgatctcggctccctgtaacctccacctcctgggttcaagtgattctactgcctcagctttccaagcagctgggactataggcgtgcgccaccacacccagctaatttttgtatttttagtagagacggggtttcaccatatgttggccaggctggtcttgaactcctgacctcaggtgatctgcccacctcggcctcccaaagtgctgagattataggcgtgaaccaccatgcctggccatagcattatttctaatagtgaaaaattggaaacatgctaagtgtctatcaatatagcatgagttagatttatgatgtcaccattcaattgaaacactacatatctcccaaaaagaatggtgttccaatatggaaagatatctaagatttattaagagaaaaagcacattgcagaacactgggatcctatttgcttttttttttctttttttgagacagagtcttgctctgtcacactgcaacctccgcctcccgggttcaagcgattctcctgcctcagcctcctgagtagctgccaccatgcccagctaatttttgtgtttttagtagagaaggggtttcaccatgtttgtcaggctggtcttgaactcctgaactcgtgatccacctgcctcagcctcccaaagtgctgcgattactggcatgagccaccgcacctggccatgaaatttttttttttttttaaagagctgttcatattcttattgcctagaagatgtctgaaattacacccaagaaactctttttgagacggagtcttgctctgttgtccaggctggagtgcaatggcgtgatcttggctcactgaaacctctgccttccaggttcaagcgattctcctgcttcagccttctgagtagctgggactacaagcgcccgccaccacatctggctaattttttgtatttttagtagagacagggtttcaacatgttggccaggctggtcccgaactcctaatctcaggtgatccacccaccttggcctctcaaagtgctgggattacaggcatgagccactgcgcccggctgaaactctttttttttcttttaagatggagtctcgctctgtcgcccagacttgagtgcagtggtgtgatctcagctcactgcaagctctgcctcccgggttcacaccattctcctgccctagcctcccaagtagctgggactacaggctcccgccaccacacctggctaattttttgtatttttagtagagacagggtttcaccatgttagccagcatggtctcaatctcctgacttcgtgatcctcctgcctcggcctcccaaagtgctgggataccaggcatgagccaccgtgcccggccagaactcttaatagtagttatttatgcacgctgggattggaagacatttactttttactggatgtctttccgtattgtgtgcttttttttttttttttttatgtagggcatacattacttaagtaattttaaagcctccataagtaagtgtgatttcctgcccatgtgtttggcaaaaggaattgcattggtggtagacttacattatagtcttacctggagtagcacaggaggacccaaggttaataggtgaacttcgaggcaagccttagcattgaggttgccatcagcattgcttggttgatgtgttcattcttctgggatggattacaacctttactggactttatacttttcaccagtaaggctttaaaaaaggagttgaaacattagagaataattatccaggcagtaatattcactggtaaatagtcttccagcctgtggcccaattggttgattcttttacgttaaagaatgcagcctcagctgctctgcctatggagtaggattcttttatttactttcttaataaacttgcttgcccctggctcccccccaccaaaaaaagaaggcagcctcccttttgcgaatggtaatttcctatagtttcctcgtagaattgtggagttacctatgctgaggttataggttagggtattgagatccagagttgccacttctgaggtgtcacaactgctaatggtaaaaccatttctaaagcccagttcttgtgactttgtccagtgattgcctgttcaccgtttcatgctgccttcccatttgagcattcccaggaggaaggggaggttgccagggacctagtaccatagtccgaccttggaatcgttgaatatgagggaaagcgttggcttctcccttctttctcccaaacattggaagtatttttggctgttaaaaagcaccccttgttccatgtggaatcccttgtttaaaagaagtaaaatatgtacctcctgtcctccacagacctgaggaccagtgtgatctcaagaaggttacaggtaaatgtagatgtctctaactgaaaggtggcttttacaggttagagaaaagagagaaccctgatctgaaggctattttatgaagtaattaaaatgttctaaactttaaaaataactgctcaaataattgtgttgtatagttacttatcaactggaggggctgataagtatttttctaaaacatttttaaggaaattttttcctattttctaatttgctaattttgctcaagtagtttgttagatattgttaatatagatgttggttataactgaatgaaagggaacaactactttgacattttgaaaaacaagcttcattttcttctagtctaatggatgggatcccaatgatatgtttcgatataatgaagaaaattatggtgtagtgtctacgtatgatagcagtttatcttcgtatacgtaagtttgaaaagtttgtttttattttagtgcatttgtctttgattttcatcagcttaatttatgatgaataaatgtttgttagtttttaagttaaacaattacatgaaataatttttctcttattaccaactgtgataaatttccattaaaaaaagggaataaatgtagtttgcctataccctgtttttatgctctaaacaaattttggttttgtctttttttttcttttgagagggaatctcgctgtgtctccaggctggagtgcagtggtgcaatctcggctcactgcaacctctgcatcccgggttcaagcgattctcctgcctcagcctcccgagtagctgggactataggcgcgtgctaccatgcccatctaatttctgtatttttagtagagacggggtttcaccatgttggccaggatagtctcgatctcttcacctcgtgatccacctgcctcggcctcccaaagtgctgggattacaggtgtgagccactgtgcctggccggttttgtcttctaagttgttaaaaaatatctaaatttgcaagggcagagattatggtgaacagtttaaccagtttttgaaatatgttcctctggagaaaaggtaacagaaaaaaaagttagaattttgatttataaatacacagatcactataacttttagttttagttttagttttagtttctgtttttaccagtattctaaactctaaactttcttagtagttgattatgacagatacataaactgtggctttaaaggactcattttgcttttcttttcctcatgtttcagagtgcccttagaaagagataactcagaagaatttttaaaacgggaagcaagggcaaaccagttagcagaagaaattgagtcaagtgcccagtacaaagctcgagtggccctggaaaatgatgataggagtgaggaagaaaaatacacagcagttcagagaaattccagtgaacgtgaggggcacagcataaacactaggtatttaaaggaaatcatgatgcagtattttggatacacaactcaaggtctgtgtgagacggtgtattgttattatatttcctcttcctttaatatagcttaggtagagaatgcaagtagaattggtttaagatctgttagagaaaaggttatggtgatcttggaaaatatgcttttgagagtaagctctgtggagccaagtgttggtatatcacggtgagcaatccaagatcttgaagagcttgttaaaatagttatctggtgggggacacgtgtaacaatcacagcagtacaatatgatttgcttggttaaaggcatgttcaaagtactaggaacatacagaatgaggaggagctagcataacctgtagagtcagagaaaacctcattgaggaggtgacattttgtgataagataatagggtctttgacacttagagaagagttgggagaagagtttatcacctgatgaaaagccatgtacaagcatggctatgagaaaatttggccagctcaggagagggctggttgttgcatgtgtctggaacacaggatctgtgtcaggtgcagcagtggcagttgatagtaggaactgaggtcattaaaggacttggcatgtcatgctaaagagcaccctgttggaaggagatggggtgaataaaccctggggcattgaggactggctgagacacagagaacagttagtgcactgaaatagttcaactgtgagaatttggtaaccacctagttaagggatgagcctgaggtttatttgataactaagtgacttaatggatgtactggtaagagagagaggaaacatggagcaagtttgaggggaaaaacagtgactccgtttgtgcagctaattgcatatgtgggcttgtgggtctttcatttattcataaacgtgttgagaaatacctgctacctatctagtaaagtaagagatgcatcctctcttaaaggcagtcagcttagagtctggtgatttgaattgacatgtccactgatagatgttgacactgtgagactggcggttcagtttgaggtttcatcagcattgccgatattggagccatgaaaaaccaaagaacagccagtgagagaagagatctcagagaaaataaaattgagaaagtgaaggacaaaaaatgttgtgaagatagaccaagattgatggaatcagccatagagaggtcaagtgggatgagaatgagcacgcatctgttaaactttgtgcttaggagcagaatctaagggaagggacagtccagaggttagaactcagggtaagatggaagaacaggggcatctgggagtgaggcagtttggtttagtgtagaacctttttgtaacaagcattcccttctgtctagatgacttttagatatgtttcattggcttggtaccttttagaataaaatgatttagaggatctctcattttcagggaaaataaatatattcctcctggacaaagaaatagagaagtcatatcctggggaagtgggagacagaattcaccgcgtatgggccagcctggatcgggctccatgccatcaagatccacttctcacacttcagatttcaacccgaattctggttcagaccaaagagtagttaatggaggcaagtattttgaccagacttgtcaatatcattgataaaatagttttctaaatacttaaaatacttaaaatagtttacataactgatatgaatgtgcactttaatgatttggtgagtagctttcacttcagcattacttaaaattggcttttgtggatattaaattagtaaaacattgtatatgtcattgacatatatattatttagcatgatgaaatattcatgatgtactaagataaagtgctacatttaacccaagacaatcacttggccaaaaacacttcacatataaagaaattggaaactttgggtaggttctcaattttaaaaacactggataataaaattttttagacataatttatatggaaaattctaacctatgtgcaacactgtggttaatatagatcaattttcattatttgtttctatattatgcttacttcaagaaaggatctgaggtaacttataatacaagacatgatcaagagtcatgtgaagaaagtgactagagaaatttgcttaaaaaacaacaaaaacaacccttagtctaagggtggatgttacagtttagcaacttaagtaaaagaaacctgaatctttagtaggaagacattttttactctacctctaaatctaggttgaatatatcttgtaggttgtggatcttttccataaatcagggatactgaacaacagttctatggatggtatggaaatagtaatagcaatagtatgttactaactttgtgggaaaagagtggacattcaattttagctatttaaatttggaaagttagatgaaaatagagaacactaagtttccaatttcatttgttttcattgagtcttttctccagaattcctctccaaatggacactcttgagtattttcagtacttaatattgggggtgaaatttctttgctcactgaggaaagattttagttgtttataaacagaattttaaagttaaaaaacctgaagggggctgagaaatatatgatacttaagtgtgtggaaccctatggagaggagacctggactgtttgataagattaaggtaagtgatatgtaatgttaaatactagctgtatctttacctaggcatatccatcagtataaatttatttggtgatgactgctttgtagttgcagtatttattaagcagtcgcttagataagtgtttaactgtataaattatttagaaggtctccctttttctagtttaatgaggtcaagactttttttttgaaatagcaatgaatattatcatttgatactcacaggagtcacaaactctagaagagtaatgttttatttctacttaaatgggacttgcttaataagattccaaactgagttctgggttcaagtgtaaacctgatgaaaatcatagataattgtaaggaaccagcatttctaattggatataatagctactgcttattttcgttatgcctcagagttaaaactaatacagtaaataatcttactcctgagtaggaattattgtgatttattatgtgaaattatctagtgtatgttatattcctttaaacaaccagttactgagaaacagttatagaagcaggattaataggcaaagtcttaactgtcttcttcaatagtgtgtatagatcctaattaaccctttgggaacgtgtattcatttaaacagacttaatcttaaggaggttaaagtaaaatgtgaatttatgtcagttaagttatgctaaaacttatcacaaatcaaatgactgtcctcaaagggttaaaatgtacaagaaatcatttttgtcattttactttttttctgtttacttttttccctcatttttttctttagtttttatactttccttcatatcatttgttctgtcaggtgttccctggccatcgccttgcccatctccttcctctcgcccaccttctcgctaccagtcaggtcccaactctcttccacctcgggcagccacccctacacggccgccctccaggcccccctcgcggccatccagacccccgtctcacccctctgctcatggttctccagctcctgtctctactatgcctaaacgcatgtcttcagaaggtacaataccacaatttgttcatgtttttgtttgtctttgtttaactcctatgtgagtttataattacaaaatagtttcctcttcattatttaataacctataatttctgtgttttaactttagtttattaaaactatttctattaaccttttgttcattagagagaaatttgataaatgtgtgaagctataaactctcttgaattgttgttaaaaagggggtttatctctgcctgataattatgcttctttacagccccagaagggtctgccccacagccttccccctccttatttgcactgtatacagtagttaaacaaatgaactttcttcagccagtcttgaacttaggttcattttacagctctttggccaaggtcctagtgaaccttcctattggccataagcagggatggtgttttctgggtcttttttgagagcgacagcccatgtagctgactttgcgtgtctgcccttagattaaagtagttgatttttagaatgccagaagaattctaaatttaactgagtaatttttttaaagttagctttgcaatcttacatagtgaaaggctgctttaatctggaagaagtccttgatctgagataaaattgataaaaacgacatatgaatttgaatatttagctatttctttcctcgtcaaaaataagaataaaatcttgtaattcttattcagtatttggcgctaaatccatcattgccacatatcaaatacagggatatgttgtagaaaggtaacattctaatttaaatgccacccatatattaaaaacctgttttctgaatcataatgtccttttgatactagttctgaatatttgtgttaaaattttaatctgatttgttcattaaaattagttaatattgcttatgttgggactaataaagttttccgcacaaaatgtgtttctcctgcttccctggagaaaactgtattggctacttttaaataaattgttaccatctaagcaggcaggtcatatgactttgactgaagcatctaaccttgaagagcaagttccactgattttcaaggtgacttctttgctcaaaagggccttaatagtggtcactaaatgcaaaattctgttgatatttttcttgtagtccatcatttgagtaagcgatgtttatttaatgagaatatattaaataaaacatgatcattaatgactgtgaacatctttattacattaagatttaaggactgctcatgtattaacttcacacagaaatatactttctgtgtcattcagagatgttgaatatttccatttgaaaattatagtgtataacattagcattcttctaaagatcatgttcgtgtttaaattcctgttggaagccaggcatggtggctaacgcctgtaatctcagcactttgggaggctgaggcaggtggatcacttgaggtcaggagtttgagaccagcctggccaacatggtgaaacctcgtctctactaaaaatacccagctacttgggaggctgaggcaggagaatcacttgaacctgggaggcagaggttgcagtgagttgagatcgtaccactgcactccagcctgggcgacagagacagactctgtcttataaaaataaaaataaaataataattctattggcaacatatattaatttgaagttctaaagagtttggcagccgggtgagagagtgaggagatttggctttgacattagggaagttttcgcttggtgttaacaccagtaggcttctctgatgagggccattctgtccactcttttacctgatagattggtctaatgcacagtagactgatttagaaagagtagtcactagtggcatggcagaatcaataatgtagaattttgacaattcatatagtgctgatttctcccccaaatgtcagttattttggtcatctattaatagactaatacaagtcatccctttaatagaattttcagctcacagcctgctaagcctaagaaactgcttacaggttactgcttactgttttaagccgagttttaaaattgatgatcatgatagaagagataaataaactaaaattttagagaaatttaagaagggtatgtacatatgttttagtggtatcggggtgtatagggattaatagtcttctgtttaaattttttttttctaattttagaagtaatgtagaaaattcgggtcagggaaaggtaaaatatatggaaagttaaaaatattttatcatgtagtcataatttctagtaacatatttctttacaaataagacatagttgaaacagattgctacagttcttttaagagttgacatcttattgttgatttcttaccaccaacttcatccctccctttctttaaaaataaagggaaataataaaatttatttataaaactttgtggcattccacaaaataattctgaaagaattagtatggccaaaaaaatatgtatggtgttttttttttttctatttttaaccaaggaaaaactgtagagtgagtgagtgtgtgtgcatgtgtgtgtgaatgggtgtatttagcagaaaagtagtactgatgaatatcatggaatttatgtgatgttcactgtttcttccttagggcctccaaggatgtccccaaaggcccagcgacatcctcgaaatcacagagtttctgctgggaggggttccatatccagtggcctagaatttgtatcccacaacccacccagtgaagcagctactcctccagtagcaaggaccagtccctcggggggaacgtggtcatcagtggtcagtgggggtaggtaacacttgggcataatgatggtactcattttgtcattacactagatataaagagggctgagctacaactctgtttgaggaagtgtaagtatgtatatgttaaaaatagtagaatcaccaggaattgggaaacccatatttttattctgggctctaccacttattcatcatatattaaagcaagtcagacactcattctgaagttgagatttcgcagtgagtaaagtgttaataattcttgcctagtctacattatgggattgtgatgagattcctataaggttcataaatacagatatattgtaaaactataaagttttgtaaagtacctctctaatatgaggcaaacacagtatgtaacactatttggagggaccgtatttccttatctttttagcagctttgtttatcagtacattctataaacatttatttttggcttacattgtagtgtgtttctatagcatctgtatatggcactaattcccaactatatttccataataaggaatatcaaatacaaataaagggtccaagttttatttgtgattagcataaggaatatgctgacagcagctataaaagtataaaaattaggctgggtgtggtggctcacgcctgtaatcccagcactttgggaggctgaggtgggcggatcacaaggtcaggagatcgagaccatcctggctaacacggtgaaaccccgtccctactaaaagtacaaaaaaaattagccgggcatggtggcgggtgcctgtagtcccagctacttgggaggctgaggcaggagaatggcatgaactcgggaagcggagcttgcagttagctgagatcacgccattgcactccagcatgggcaacagagcaagactctgtctcaaaaaaaaaaaaaaaaaaaaagtttaaaaactagacgttgacatgattttacaataaggctgactgcttttgctactttgccaatcagtccttagtgctttgttcccataactgtggtaagcaagagcttacaaagaatacttaaaacaaacaaacaaacaaacaaaaaaaacactttttctcttttaatcagtccagagaacctttaaaagaaacaagatcggccagttgctgtggctcatgcctgtaatcccagcactttgggaggctgaggtgggtggatcacttgaggtcaggagttcaagactggcctgaccaacatgatgaaaccccatctctactaaaaatacaaaattagctgagtgtggtggctatttgagaggctgaggcaggagaatcatttgaacccaggaggtgaaggttgcagtgagccaagatcacaccattgcactccagtctgggtgacaagagcgaaactctatctcaaaaaaaagaaaaaagaaacaagatcttcaagcttaaggaaacaaaaacaaaactcagctgtgttaaatctgtttttagttgctatacatttctgctcagcttcatgtgatgcacattcatgtaattgtatcctaaattcctttgtactttttattttcttccttggtcttcaattatcttaagactaccaagaaaacaaaaattttaaaaatcttcttcagccggtcaggcgcagtggctcacggctgtaatcccagcacttggggaggctgaggcgggtggatcacgaggtcaggagttcaacaccagcctggccaacatggtgaaacgtcgtctctactaaaaatacaaaaattagctgggcattgtggcgcgttcttgtaatcccagctgctcaggaggctgaggcaggagaattgcttgaaccaggacccgggaggtgtaggttgcggtgagcggagatcgcgccactgcactccagcctgggctatagagtgagactccatttcaaaaaaaaaaaaaaaaatctgcttcagctattctgttaatcttttgacattacttagatggtctggaaataaattttgagaataacatgattagaagtgagagagtataagcatagttttggagatacactcagaatagcattatagattttctctttttactaattggaaaaatggcagttgttgaataatagttttcttccgtgacccttgtgacttaaaaaaaaaaaaacactgaaatgaaataatcgaaccattttctctaaacctttgaatctgagctctgcagttaggtttataatggtatatgaaacctattagatatatacttggaagtcatatgggatacaaaccctgcttttattatcttccccttttgactaacttgggtctcaagtttccttaattactgcacagtggaccttgatgttgctataaagaatgtgtagggctgggcatggtggctcatgcctgtaatcccagcactttgggaggccaaggtaggcagatcacctgaggtcaggagtttgagaccagcctggccagcatggtgaaaccccgtctctactaaaaatacaaaaaaattagctggttgtggtggcgagtgcctttaatcccagctactccagaggctgaggcaggagaatcacttgatacatttagttaggagagaaaatcatacttatgttagtaattgctgctgttcttcatatacttgtggttttgattgccagcaaattcctaacattttggaaaagaaaacagtaatgggataaagggtaagggctagagaggacagttttatttacctagatcttcagagaagcctgaagcctcttttaggaagtaacatttgaactgagaatgtaataaatacattttccctttcttctagttccaagattatcccctaaaactcatagacccaggtctcccagacagaacagtattggaaatacccccagtgggccagttcttgcttctccccaagctggtattattccaactgaagctgttgccatgcctattccagctgcatctcctacgcctgctagtcctgcatcgaacagagctgttaccccttctagtgagggtatgtaacaaagggcttctggatccataatctcagctgtgaaattgaatgttagagggtgatattatatgaaaaaattctaggttatttttattcatagacaagtatttttagtgcacatttaaaagtttatgtaaattttgatgttgtttaatactactaatttaatatagtgtctgtgttacaaaggttaacattcctgggtgtcaaatacctacataaataaaattattggtgtttcatatgacatctgcaaaggaaaaaaagcctctgtttaaatgaaagcattattttccaaaaacataggaaatcaaaattattgttcagtgttttcttgttttgcttttctaacttatctgaattttttttaaaaaattgttttctagctaaagattccaggcttcaagatcagaggcagaactctcctgcagggaataaagaaaatattaaacccaatgaaacatcacctagcttctcaaaagctgaaaacaaaggttagagtttaaagagtcattaagcttaactgtaggaataggaagaagtatgtctaatttcatgcccatacagaatatttttgttcaacatttcttcttactattgtgatagataaatgtattgcttgacaaattccaaaatccaaatttaatatttgaaattattttctgatcttatatcttattctaatttctatcatctcatactaaaaagaatgtgatgttaaagtttaaaaataaacctgtgtcttaacagttcttaattttacaggtatatcaccagttgtttctgaacatagaaaacagattgatgatttaaagaaatttaagaatgattttagggtaagtattgtactaactgatgaatttgagttttagaaaataagcattactaaagatttatctatttataaaaatgcgttatgtatacagtcagaaacatcaaaccatatatgtagaaagcagaacatttttaaagtggtctttgcctatcctttaagtgggataactaaaatcatgagatttggtaacaacaatatgtaggtatcaaatgagagtatagccctgacatttgaaaccaccatagcacagcttactatttgatggtcatttgtactttgttcagtgaagctagatattagtagagcaaggccaagtcattaataatctagtgtggcaaatggaagatgtactggactctggtgttctgaggtagttggagatttatactttgtacacaaatatattgtggtcaaaatctttctgtaacattatttctctgtcttagcacaggctttacttaacatctctccttgattgtcatttcattcttttgcatgttatttactataggtatcgaggtagattttgagaccaaccaataaatcttcttgaaacttagcttcttagaaaggaaaatctaaataccagccttttaaaaaaagtagctgaattaaaggatgagtgaaccaaaggcaaaggtagcctttcctcagcctgtgttttagctttctaaatgttaacaatagcttcattcttgacttattggtaacattcaaaatactacttattatttcatactttagcacatgtatctattcagctttaatgctattaacagttgttaacctaagttttcatttgttggcgggcacggtggctcacacctgtaatcctagcactttgggaggccgaggtgggcagatcacctaaggtcaggagttcgagaccagcctggtcaacatggtgaaaccctgtcttgaccaaaaatagaaaaattagctaggcatggtggcgcacacttgtaatcccagctacttggcaggctgaggcaggataatcgcttgaacccaggagacagaggttgcagtgagccgagatcacaccactccactccatcctgggcgacagagcaagactgcatctcaaaaaaaaaaaaaaaaaaaaaaagtttttcaatttgttaaacaatagttaacacatacaaatgatacaaagaatattgaatatgatcatgtgcccactacccagcttagtaaataaagcattctaacacagttaaactcctcttatgtatctgcccctcctcagctgcttccccctgtttccttccaaaaggaagggtttcttttctgtgcagttctttatatttatactgcatatgaatatatctgtgagcaatagatgatattttgcataatcttaaatttgctataaagtcttttttttttttttaattgatcattcttgggtgtttctcgcagagggggatttggcagggtcataggacaatagtggagggaaggtcagcagataaaaagtgaacaaaggtctctggttttcctaggcagaggaccctgcggccttccgcagtgtttgtgtccctgggtacttgagattagggagtggtgatgactcttaacgagcatgctgccttcaagcatctgtttaacaaagcacatcttgcaccgcccttaatccatttaaccctgagtgacacagcacatgtttcagagagcacagggttgggggtaaggtcatagatcaacaggatcccaaggcagaagaatctttcttagtacagaacaaaatgaaaagtctaccatgtctacttctttctccacagacgcagcaaccatccgatttctcaatcttttccccacctttcccccttttctattccacaaagccgccattgtcatcatggcccgttctcaataagctgttgggtacacctcccagacggggtggtggccgggcagaggggctcctcacttcccagaaggggcggccgggcagaggtgccccccacctcccggacggggcggctggctgggcgggggctgaccccccacctccctcccggatggggcggctggccgggcgggggctgacccccacctccctcccggacgggttggctgccgggtggagatgctcctcacttcccagacggggtggctgccaggcggaggggcttctcacttctcagacggggcggctgccgggcagaggggctcctcacttctcagacggggcggccaggcagagacgctcctcacctcccagacggggtcgcggccgggcagaggcgctcctcacatcccagacggggcagcggggcagaggcgctccccacatctcagacgacgggtggccgggcagagacgctcctcacttcctagacgggatggcggccgggaagaggtgctcctcacttcccagactgggcagccgggcagaggggctcctcacatcccagacgatgggtggccaggcagagacgctcctcacttcccagacggggtggcggccgggcagaggctgcaatctcggcactttgggaggccaaggcaggtggctgggaggtggaggttgtagcgagccgagatcacgccactgcactccagcctgggcaccattgagcactgagtgaacgagactccgtctgcaatcccggcacctcgggaggccgaggctggcagatcactcgcggttaggagctggagaccagcccggccaacacagcgaaaccccgtctccaccaaaaaaatacgaaaaccagtcaggcgtggcggcgcgggcctgcaatcacaggcactaggcaggctgaggcaggagaatcaggcagggaggttgcagtgagccgagatggcagcagtacagtctagcttcggctcggcatcagagggagaccgtggaaagagagggagagggagaccgtggggagaaggagaaggagggggagggggagggggggagagggagagggacaatgatgtcttgctgtaggtattcttccccatttgaattttttcctcagcattattttttttaacatcattcagtctcctcttatactacacttggattgaatttaatatctcatgaagaaaaaacatttctactttgaagcatgtgaattagcatgtttttataacagctttattgagatataatttacatatataaataaaccgtttaaagtgtataaatcagtggtttttaatgagatataatttacatatataaatcaaccatttaaagtgtataaatcagtggtttttaaaatattcacaatgttgtacaaccgtcttctcagttgattttaaaacatactcttcacccccaaaagaaaccccgtgcccagtttagcagtcgttccacatttgcctccagcccttctctttcccctactcccaaccctaagcaaccgttaatctactttctgtctctatggatgggcttatttggggcaaattccatttcatacaaatggaataataaaatatgtggcttttatgactggcttctttcactcagagtagtgttataaaagttcatccatgttggagcatgtttcagtacttcatttctttttgtgactgactaatattccttgatgtggataataccacattttgtttatccattaatcagtttgtagctatttgtggtgttctcactgtttgactattctgaataacactgccacaaacatgagtgtgcagtttttttctcgtcctatcttttcatttcttttgtgtacctacctaggagttgaattgctgggtcatatggcaactgtgtttaaccttttgaggaactaccaagctatttgccaagatatctacactattttacattcccaccagcagggtatgagggtttctgtttctccacatccttgctaacacttattgtcttgtcttttttgattatagtcatccttgtgggtgtgaagtgttaacctcattgtggctttaatgtgcagttctttcatggctaatgatgttgaacatcttttgtgtttattggccatttatatatcttctttggattgatgtctgttcaaatctttacccattttaaaaattgagttgtctttttattattgggttgtgggagttctttatatattgtgtgtacaagtccctgttagatacatggtttgcaaatgttttctcctgttctgttggttgtctttttactttttcatcccttgaagcacaaaaatttttaattttgatgaagtccaatttatctgattttgaagtaagcttttggtgtcgtatctaagaaaatactgtttcatcaatcattaaggtttattactcttctgggtttttttaagaattacatttagaggtgtgatccatttggagcaactttttttttcttttgacacagaatctcgctcttttgcttaggctggagggcagtggtgcaatcttggctcacagcagcctcagcctcctgggctcaaatgagtagctggtactacaggtgtgcaccaccacaccttgctattaataacttttgtatttttttgtagagacagaatttcgccatgttgcccaggctggtctcaaacacttggactcaagtgacacgcccacctcagcctcccaaagtgaaaaattgctttcaccttgcactgcggactcgccctgaattctttcttgtgcaagatccaagagccctctctgggggtctggatcgggacccctttcctataacaatattatgagaataacatttgattttttttaagtgaaacaaattgttattaaaaaattaaaaaaggtcataggagagtgacttggtgctcagcccattttgagcagttatttaatatagcataaggtggggttcaaattcattctttatattaattttttatttctaattgacacataaccatacacttataaccatttttactgtgtaagttcagattcattcttccgtatgtaggtattagttgtcccagcaccatctgttaaaaagactattcttggccaggcacagtggctctcaacgcctgtaatcccagcactttgggagtcccaagcaggcagatcacatgaggtcaggagttcgaaaccagtctgaccaaatggtgaaaccgcatgtctactaaaaatacaaaaattacctgggtgtggtggcgcacacctgtagtctagtcccactactgtagtggctgaggcaggagattcgcttgaacccaggaggtagaggttgcagtgagctgagatcatgcactccagtgtgggcgacagagtgagactccatctcaaaaaaaagactattctttcctccattgaattatcttcacatgcttgttggaagtctgttgactacaaatgtgaaagtttattactggactctgaattgtcctccactgaatctctatgtcttatccttatggcagtaccatactgtcttgattagagttactgtattttaaaaggctgtactttttcagttagcagaaaacattttagctatcagcacaactttctgtaaaccttcattaatgcttgacttaaattccaagaaggagcaacataaaaagtcttatctctttaggagttttagtcttactacttttaggtgcctgaataaccaaatgtattatttagcctcttactaataactccttgatccataggggcataccaggaagaaaagaagtggtttttaaaaaatgagagtgggccgggcacggtggctgatacctataatcctaacactttgggaggctgaggcgggtggatcacttgaggtcaggagtttgagaccagcctggataacatggcgaaaccctatctttattaaaaatatataaattagccgggcatggtggcacatgcctgtaatcccagctactcaggaggctgaggcaggagaatcacttgaatccaggaggtggaggttgcagtgatccgagattgcatcagtgggcgacagagcgagaatctgtctcaaagaaaaaaaaagagagtggaaaaaaaaaatatgtgtcccagaacttaaattttaattaaaaaaaaataaaagagtgaactttctaattgttctcttcagataatataatgttattctcttatgttttattgcgtatttcctgtgtaccagatgctgttcttcatgcttgtatgttaaatcttgtctaacatctctgtcaagcaagttctgtttgtatctgcactgtgtatattaggcagcttgggcaaagagaagttaagtaatctgcccaaactcacatggctagtaagtaagagggctgaccatctggtgtttaagcttctagcagtgctttgaatagtaactaatgcatagtgcatgctgcactgtcagtcagtgattcattagagctaacttcatgacatgctcatagccccaaactgcatttgttcacaaatatctgtagtccttcatttaggcagaaatagaaataccttgtgtgtttgttgttccttcccttttgagccatatgcagagtgctgatagctttatttgtgtaagaattgctagtaatttgatctgttttgggttaataatgtgggttttagaggtaaatggacctaggtttgaatgttggcctctatacatcatgtgcgtaacattgtggcatgctatctacttcccccaagccaaaatgggttaattttagaacctgcttcatagtgttcctgtgagagctcgatgagatattgcctataaagtgtttagcatagtgcctagcacatggtatgtattcaatacatgttcattcttactagcaaaatatagatgacccagtattgtacagagtatgtacaatggtgtcattgtaccatttcatgtggagtcacataagaatttcagttttctgctgggcatgatggctcactcctgtaatcccagcactttgggaggctgaggtggatggatcagctgaggtcaggagttccagaccagcctggccgacatgatgaaaccccatctctactaaaaatacaaaaaattagccaggcgtggtggcaggtgcctgtaatcccagctactcgcaagactgaggcaggagaaatgcttgaacccgggaggcggtggttgccatgagttaagatcgtgccgctgcactccagcctgggcaataagagcgaaactccgtctccaaaaaaaagaaaaaaaaagaacttaagttttccattagatttagtatagtgcagagaggaaatacagcagagtgctatattccatatatagcaatatagcattagaacaatatattccaatacagcagagtgctatattcagataccaactagtggacttgctatttgtaagatggcaataatagtatctacatcaaatagggctgttgtgaagactaaatgaataagtctataaatagtttagaacagtgtctggacaggtacagtggctcatgcctgaatcttagcactttgggaggctgagacaggtggatagcttgagctcaggcattaaagaccaacctgggtaacatggtaaaaccctgtttctacaaaaaaatacacacattagccaggtgtggtggcacatgctaatagtaccagctactcaggaggctgaggtgggagaatcacttgagcctgggagatggaggttgcagtgaggtgagcttgcaccactgcgctccagtctgggcaacggagtcagaccctgtttggaaaaaaaaaaaaaagtgtccaacccatagtaagaaatgcagatgtgtttgacattgtaagaaaaagcaacaccaaaagtctgatttttgccttcactcaagaactcttatgataattaaactccgaagtccttggcaatatatatagttggtctgttatgtggatcgcctctactaaagatttttgtgaacaaatgaaagtttaagtagtaagttcctacatcgtgacttaaattgccagtgtgcccacataaataccctgtcaacatttgcccttagccacttgactctttagctatattggtaatgcagtaaagcttgcgatgcgccagagttgcataatgctgtttgccatgacaccaagagccttggtaatgaaaccattgaaattggtttgcctatactgaggctgaagaggtatcttggctctctaattttaaggcaacctttttggctgtgtaggtttctctttagcttgtttctcaccacctggggctgtggcttaggtccgttgtcctaacctgtggcttaggttctgtttttgttgcttgtacttgctcccccttttttcagccattcctgttttctttcttttgtagaggatgccatcttaaatcatcttcagccagtggtagcattttattttttctggtctgcaaacttaaaaacctcatcacttattttgctaatatctttgtcttctgttctttttgatggtccttggttttgcagtctactttaaaggtttttatttttttatgggtacatagtagacgtattattcatagggtctgtgagatatttagataaaggcatataatgtgtaataatcacattagggtaaatggggtatccatcaccatcatcattcatcatttctttgtgtaatgaacgttgcaattgtactccctcagttattctaaaaagtacaacaaattaatgctgactgtagtcaccctgctttgttgtcaaatactagatcttattcattctttatttaactttttaaattttaaacttattttatttatttatttttagacggagtctcactctgtcgccaggctggagtgcggtggcgcagtctcaactcactgcaacctccgcctccagggttcaagtgattctcctgcctcagcctcctgactagctggaactacaggcacgtgccaccacgcccagctaatttttgtatttttagtagagacggggtttcactatgttggctgggatggtcttgatctcttgaccttgtgatccggctgccacagcctcccaaagtgctggggttgcaggcgtgagccaccgtgcccggcctttaaaattattttaaatcattttaatatctttttcatttctgcctccggtcctgcagagttcttattcgttctttctaaattttctttgcacccactaatcacctcatttcccttcttctccccattacccttcccaacttctggtaaccattctgctatctccatgtgttcaattgtttttatttttagtgcctgcaaacgagtaagaatatgcaaagtttatctttctgtccctggcttattttacttaacataatgtcctccagtgccatctacattgctgcaaatgacaggatctcattcttttttatggctgaatggtaatctattgtgtatatataccacattttctttctccatttgtctgtcagtggacacgtaggttgattccaaatcttggctgttgtgtatatagtgccgtagtaaacatgggagtgcagatattccttcaataaactgatttcctttctgagtatatacctagcagtgcaattgctggatcatatggtagctctatttttagttttttgaggaatttccatactgttctccatagtggttttaccaatttacatgtccaccaacagtgtgtgaaggttcccctttatccacatcgttaccagcatttgttattgcctgtcttttggataaaagccattttaactggggtgagatgatatcttgttgtagttttaatttccatttttctggtgatcagtagtattgaatacctttcatatacctgtttgccattcataaataacgatgaggtcttgctgtttggcccaggctggtctcgaactcctgggctcaagcaatcctcccaccttggcttcccaaaatgctgaaattatagttgtgagccactgcacctggccttgtatgtcttccttttttttttgttttgttttgtttttgagacagagtctcactttgttgcccaggctggagcgtagtggtgtgatcttggctcactgcgccctacacctcccggattcaagcaattctcctgcctcctgccaccatgtctgcctaatttttgtatttttagtagagacgggatttctccttgttgcccaggctggtcttgaactcctaacctcaggtgatttacctgcctcagcctcccaaagtgctaggattacaggcgtgagctgctgcgcccagcctgtatgtcgtcttttgagaaatgtctattcagatcttttgcccatttttaattgagttactaaaattttccctatggagttgcttgagtgccttttatattctggttattgatcccttgtcagatgagtagtttgcaaatattttctcccattctgtgggctgtctcttcactttgttgatggtttcctttgctgtgcagaagctttttaacttgatgtgatcccatttgtccatctttgctttggttgcctgtacttttggggtattactcaagaaatctttgcccagagtaatgtccctgggagtttaatgttttcttttagtagtttcatagtttgaggtcttagatttaaatctttagtccattttgatttgatttttttttaatatggtgggacacaggggtctggtttcattcttctgcatatggatatccagttttcccagcaccatttattgaagagactgtcctttccccagtgtatgttcatggcttctttgtggaaaatgagttcacttagacgtatggattcatttctgagttctctgttctgtttcattgatctatatctttttttatgccagtaccatgccattttggttacaataatttgaagtcagataatgattcctcccgttttgttcattttgctcagtatggcttttgctcttttgggccttttgtggttccctacaaattttagaattatttttgtctacttctgtgaggaatgtcattggtattttgatagggattgcactgaatctgtagattgctttgagtattatcaacattttagcaatattaattcttctaatccataaacatggaatctcttttcatgttttttctgtgtcatcaatttcagtgttttaaagttgtcattatagaaatcttttactcatttggttaagtttattcctaagtattttattatatttgtagctattgtaaatgggattgcgtttaaaaaatttttcagattgtttgctgttaaatataaaaatgctcctgatttttgtgtgttgatttttgtatcctgcaattttactgaatttgtttgtcagttctaataggtttttcttttttggagtctaggtttttccaaatgtaagatcatattatctgcaaacaaggataatttgacttcttccattccagtgtggatgctttttatttctttctgttgtctgattgctccaattaggacttccgagtattatgttgaataacaatggtgaaagtgggcatccttgtcttgttccagatcttagaggaaagcctttcagtttttcccttttcagtatggtactagttatgggtctgtcatatatggcttctgttttgttgaggtatattccttctatacccagttctttggggtttttttgtttgtttgtttttgagatggagtctcactctgtcacccaggctggagtgcagtggcgcaatgttggctcactgcaagctccacctcctgggttcatgccgttctcctgcctcagcctcccgagtagctgggactacaggtgtccgctaacacgcccggctaattttttgtatttttagtagagacggggtttcaccgtgttagccaggatggtctcgaactcctgacctcatgatctgcccgtctcagcctcccaaagtgctgggattacaggcgtgagccaccacgcccggccaagggttttaatcataaggggatgtggcattttatgtgatataaattatatatttatatcatgtgatatatatttatatcatacacagtataaataatatatatatatattttttagtctttgtcttttattctgttaagatgtaccatgtttattgatttgcgtatgtcgaaccatccttgcatccctgggatgaatcccacttagtcatgatgaatgatctttttaatgtgttactgaattcggtttgctagtattatattgaggatttttgcataatgttcttcagagacactggcttctagttttccctttttgatgtgtcctttggttttgtatagggtaatagtggccttgtagaatgagtttagaagtattccctcttcctgtattgtgttggaatagtttgagtaggattggtattagttcttctttaaaggtttagtagaattcagcagtgaagccatcaggtccatggcttttctttgctgggagactatttcttatagctttgatctcgttacttgttattggtctcgttacttgttattgtatttgggttttggatttctttgtggttcagtcttggtaggttgtatgtgtctaggaatttatccatttcttcaaggttttccaatgtatcagcatatagatgctcatagtagtctctaatgatcctttgaatttcggtggtaacaattataatgtctcctttttcatctctcattttattatttgggttttctcttttttttctgagtctggctaaaggtttgtcagttttgtttatctcttcaaaacaatttactgttttattgatcttttgtattttcttcatttcaattttatttatttctgctttgattttttttatttcttctactgattttaggttttgtccttgcttttctagttctttaggatgtattggcagatgaagtttttccacttttttgatgtaggcacttactgctgtaaacattcctcttattgttgcttttactgtatcctataggttttgataagctgtgtttccattttcatttgtttcaaggaattttccagttttcttcttaatttcttcatggacccactggtcattcaggagcatattgcttaattttcatgtatttgtatactttccaaagttcctcttgttatctagtgttattttattttatttttatttttgtttttttgagatggagtctcgctctgtcacccatgctggagtgtagtggcgcgatctcggcttactgcaacctctgcctccccagttcaagtgattcttctgcctcagcctcctgagtagctgggattacaggcatgtaccaccactcctggctaatttttttttgtatttttagtagagagggggtttcaccatgttggtcaagctgatctcgaactcctgacctcagatgatccacccaccttggcctcctaaagtgctggaattacaggcatgagccaccgtgcccggcctctagtgttatcttattgtgatcagagaagatagttgatatgattttaacttttttgaatttttatttatttatttgtttgtttgtttgtttgtttgtaacagagtctcactctgttacccaggctggagtacatgtcatgatcttggctcacctgcaacctccgccttcctggctcaagcaatcctcccaccttagccttccaagtagctgggactacaggcacatgccgtcacatatggctgatatttttggattttttttttttttgtagagatggggctttgcgatgtgtcccagggttgtttcgaactcctgagctcaagcaatccacctatttcggcctcccaaggtgctgggattacagacatgagccactgtgccacgtcaaatctttagacttgttttgtggcttaacatagggtctatctttgagagcaatccatatgttgaggagaagaatgtgtattctatagctgttggacacaatgttctgtaaatatgtattgggcctatttggtctatagagcaaattaggtctaatgtttctttgttgattttctgtctgaatgatctgtccattgctgagagtggggtgttgaagtttccgactgttactgaggtctgtttctcttttttgctctaataatgtttgctttatatatctggatgctccagtattggttgcatatgtatttatacttgttataacctcttgccgaattgatccctttatcattatacaataatcttctttgtctgtttttatagactttgtctcaaaatctattttatctaagcatagctactcctgttcttttctggtttccatttgcatggaatattgttttccagctcttcaattttagtctatgtgtgattttataggtaaagtgtgtttcttgtaggcaatggatctttggtttttttttttttttttttgagacagagttttgctattgttgcccaggctggagggcaatggcgctatctcagctcactgcaacctccgcctcctgagttcaagcgattctcctgcctcagcctcccaagtagctgggattacaggcgcctgccaccaagcccagctaaattttttgtattttcagtagagatggggtttcagtatgttcgtcaggctgttcttgaactcctaacctcaggtgatttgcctgccttggcctcccaaagtcctgggattacaggcgtgagccaccgcacccagccttttttttaaatccatttagccactctgtatcttttgattggagagtttagtcgatttacattcagtgttgttactgattagtgaggacttaactactaccattttgttacttattatctggttgttttgtagtcctactccctcccttcccccttcttttttacttcctcttcgctccttttttccctccctcccttccttgttttgaaagtgattttctctggtggtatgttttaatttcctgctttatattttttgtgtatctgttgtaggtgtttttgatttaagatcaccatgacagctgggtgcagtggttcacacctgtaatcccagcactttgggaggccgaggtgggtggatcaagaggtcaggagattgagaccagcctggctaacatggtgaaaccccatctctactaaaaatacaaaacttagccaggcgtggaggcacgtgcctgtaatctcagatactcaggaggctgaggcaggagaattgcttgaacccaggaggcagaggttgcagtgagtcaatattgtgccactgcaccccagcctgggcgacagagtgagactccgtctcaaaaaaaaaaaaaaaaaagagatcacataagggttgcaaataacattttataacccattattttaaaccaatgacaacttgaaactttgattgcaaaaacaagcaagcaaagagaaaactaataaaaactctacacttcatctgcccgctttttaacttttgttgtttttatttatatctttattatactatgtcttaaaaaactgtagttataagccaggcgcagtggttcacgtgtgtaatcccagcactttgggaggctgaggtgggcggatcacctaaggtcaggagttcgagaccagcctagccaatatggcaaaaccccctctctactaaaaatagaaaaattagccggacatggtggcgggtgcctgtaatcccagctactcggaggctgaggcaggagaatcacttgaacccaggaggcccaggttgcagtgagccgagagtgcgccactgcactccagtctgggcaacagagtaagactgtctcaaaaaacaatacaaaacaaaacaaaaccctggcctagtggctcacgcctaatcccagcactttggaaggcaaaggtggggcgaatcacaaggttaggagttcgagaccagcctgaccaacgtggtgaaactctgtctctactaaaaatacaaaaattagccaggcgtggtggcacgcacctgtaatcctagctactcaggaggctgaggcaggagaatcgcttgaacctgggaggcggaggttgcagttagccgagatcgcgccactgccgtccagcctgggcagcagagcaagactctgtctcacaaaaaaaaaaaaaattgtagttcttatttttgaaaggttcattttttattcttcctgctcaaaatatgagtagtagtttatacaccacaattacagtgttacaatattctgtatttttctgtgtacttgttaccagtgagtttttgcaccttcaggtgatttattattgtttgttaacatccttttcttgcagattgaagaactttttttttttttttttttttttgagacagagtcatgctctgttaccagcctggagtgcagtggtgccatcttggctcactacaacctccaactcccaggttcaagcgattcttctgcctcagcctcccaagtagctgggattacaagcatgtgccaccacgcccagctactttttgtatttttagtaaagacggggttttgccatatttgccaggctggtcttgagctcctgacctcagggtgatccgcccgccttggcatcctaaagtgctaggattataagcgtgagtcatcgtgcccaacttggttgtttattttcaaatagcctgaattcaagctcactaatgttttctgctgcttgatacatttctgctattgagagactgatgcatttttcagtttgtcaattgaatttttccactttgggatttctgcttgattctttttactaataattattgcagtctcttttttaaatttataggattctgaatttgttctctgtattatcttggatttcgttgaactttctcaaagcattcagcttgaattctgtctgaaagttcacatatctcttatcacttgggaattggtcactggtgtcctttatttttagttcatttggtgaggtcatgttttctcagatggccttgatgcttgtggatgttcatcagtgtctgggcattgaagagttgggtattctgttctttgtagtctggttttgtttgtacgcattcttttttttttttttctgtttttgagacagagtctcgctctgtcgcccaggctggagtgcagtggcacagtctttgctcaccgcaacctccgtctcccggattcaagcaattctcctgcctcagcctcctgagtagctgggattacaggtgcgtgccaccacgcctggctaatttttgtatttttagtaaatatggtgtttcaccatgttggtcaggctggtctcgaactcctaacctcgtgatctgtccgccttggcctctcagagtgttgggattacaggcgttagccactgcatccggctcccattcttcttgagaaggtttttcaagtattcaaagggaattaagtgttgtcatctaagtcttcgctcactgcagccatacatgcattagagggcaccccaagactagtaatgttgtgactctgtagaggtatcaccttggtagtcttggggaagatctgggagaattccctgtattaccaggcagtctcttgtcctcttacatttctccaaacaaatggagtctctctttgtgctgagctgcttggagtttggggaagggtgacacaagcactgccatggccaccgtcactggaactgtacttggtctcacccaaggcctgtggcagctattttctggccaccactgatgttaatttaaggcccaagggtgctttagtcagtaggtgaagaatcctgcaagaactgggtctttactttcagtgcagcaggttcccttctggcccagggtgtgtctagaaatgctgcccaggagccagggcctgggatcgggagctttaggaatctgctttattgtactggggctgagctggcacccacttgcaagataaagtcctttttactcttctctcacctcaagcaggtgggtctccccatggacaccacagctgtgaatgtgcggggtcatatctgaagctggcacaatacgacatggcaccttgttttttattcaaggcacaagggctctttagtcagctggtggtgaatcctactaggactaggtatttcccttcaaggcaatgggttcccttctggtccagaatatgtctagaaatgtcatctgggagctatggcctagaattgaggcttcagaactatgcttggtgctttattttactgtggctgaactagtatccacattgcaagacaaagtcctccctactcttccctctcctcccagagctgtgagctgtggtacctggagttgggggaaggctggcacaagcactcccttggccaccctagctggtgtctcagtgggtcacatgtaccccaagtccactgactatgagcccagcacagtaccatgacttgtccaggaattgcagtccttctggtctagactgcctttcaagtttatttaggaccccagaggactttacccacggtggtggggcttaccaaaattaagattcttttggttttttttggcagagtttcgctcttattgcccaggctggagtatagtgacgcaatctcagctcaccacaacctccgcctcccgggttcaaataattctcctacctcagcctcctgagtagctgggattaccggcatgcgctaccacctctggctaatttttttgttttttagtagagatgaggtttctccatgttggtcaggctggtcttgaactcccgacctcaggttatccgtccgcctcggcctcccaaagtgctgggattacagaccatagtgcccagcccgaaattcagattctaatcactgggatggacaattcccctctgactagggctagtctaaatactccctctgtgggtgctggctgaattctgtcctatgctgctttccactgtgacagggcagcactgagtttcaatgcaaaatcccacagtcatttctctctctctcccccgagcacacagattctttctccaccccacactgcattgtgggggaatgtcaggggtgttggaggggcagttcaagactatcttccttatcttttttggtgtctttttccttgataggatgtcaaaactgggtactgtgatcgcttacctaatttttggttcttatgaaggtgctttcttgtgtggatagttgttcaatttggtgctccttgttggggatgatcactggaaggttctgtttggccaccatgctctgtctcttctcccctgccatctcctttttttacttaggggtttagaatgtctaactgaccaatatgtacagtcaggtctcattctgaattcacctacttaatgaccttccaagctgactaggcccagcgcttagtccagcctccatgacggtccctccacatcctaattagcctccctccagttcatttcacacaaagctgctgtgttcacctttctgaactataaatctgcccagtactctaccctacttaaaattccgtatagactgcccatttgccctgagaattaaaagccaaagtcctaaacgtagctttttaaaacttttttttttttttttttaatttttagatggagtcttgctctgtcacccaggctggagtgcagtggtgtgatcttggctcactgcaacctccgcctcctgggttcaagcaattctcatatgtcagcctcccaagtagctgggatttacacgtgtgccatcacgcctggctaattttttttttttatctttagtagagacggagtttcaccatgttggccagtctggtcttaaactcctgacctcaagtgatccacctgccttggcttcccaaagtgctaggatgataggtgttagccactgcacgcagccctgaacatagcttttaagttcctttattgtcatattccttttgacgagtctatcattttctgactcacttgtacatgtgtgtctcacccttggtccagccattggtgcttttctttacttctttatttttgttattttattttattttattattattttttaaatgagacagggtatcactatgttgcccaggctggtcttgaactcctgagcttaagcagtctgcttgtctcagcctcccaaagggctggaattacagtgatgagctactgtgcccagctcattggtgctatctttttttttttttttgagacggagtctcgctctgtcacccaggctggagtgcagtggcgtgatcttggctcactgcagctccacttcccaggttcacaccattctcctacctcagcctcccgagtagcagggactataggcgcctgccaccatgcctggctaatttttgtatttttagtagagatggggtttcagcgtgtgagccaagatggtctcgatctcctgacctcgtgatccgcctgccttggcctcccaaagtgctgggattacaggcgtgagccaccgtgcccggcccccattggtgctattgttttatgtgatagagccagcttctcccttttctttggatttttaaacatactcttccttttacttagactattctccatcccaacacctttcctaaacttctttcacaccttagactagctgacactttactgagaaacctttcttttttataggttgctttttctatagactctcttagcatttactcattttattgtgaagtgtctgatcttatttaaatgacaagtataagaggatagaaactatttcatatttttctcacccagcaggcacaatttctgacatgtggtaagcactcagtaaatattgaactttagaggctaggacatttgagtgctttggtgactgtggttgtgctatataggtactctgttattgttagtttatagtaaaagcattactcttaaagtatgaaaaaagccttattcagaacatttcatgcgtatagttaatattacgtagcttgtgctcatggcaaaaatgtattactaaagttatttaagatatttaagtataattgtttcctttatttagttacagccaagttctacttctgaatctatggatcaactactaaacaaaaatagagagggagaaaaatcaagagatttgatcaaagacaaaattgaaccaagtgctaaggattctttcattgaaaatagcagcagcaactgtaccagtggcagcagcaagccgaatagccccagcatttccccttcaatacttagtaacacggagcacaagaggggacctgaggtcacttcccaaggggttcagacttccagcccagcatgtaaacaagagaaagacgataaggaagagaagaaagacgcagctgagtgagtaaacctggaacttagaccatcctgttactcaattaacttttttttttttaaaggcatttaggtccttccaactgtgaagaatccatctggacttttagactactttatacattgcccttagtttacaaacagctagtccaaacaaatgacatcttaagtaaatgaggttattgcaccctgtgctactcttctgttcttccccttttttgtaccccagggctagaaaaacaaggcataaattaagaaaagtttttctgtaaatgaacaggagttgaaaaattatcaattcaggggacctatctttactggattccactcattagtcaccctcactgtgctgctaggttgaaaaactgccactgtcaaggagagaagcatgcggtgcttctacttggaattcaaaatatttttcatcagaaactgtgttttagttaatgtttagatttgttaagatagacttaattctgcacattcagtatattaattaaatggacttttaggggctaacctcagaacttaactaccattgacttaggtgtttgggtaccaaacaatccagttaaagctgaagttttggaatgcagcttattgataaattggggactgcttattcttgatttgaggcaatttttttttacagccatgactttttccaggtatgtcatgtaaaatatcttctcacataagaattactgcatgctagaatattggtatgttgactggtagctcatacctataatcccagcactctgggaggtccaagcaggtagattacttgaggttaggagttgaagaccagcctggccaacatgtgaaaccctgtctgtactaaaaatacaaaaattagccaggcatggtggtaggtgcctgtatcccagctactcgggaggctgaggcaggagaattgcttgaacccagaaggtggaggctgcagtgagccgagatcatgccactgcactccagcctgggtgacagagcgagactctgtctcaaaaataaataaataaataaataaaaggatactgttatgttaagaattgcttttaaggatatttcataagtagctactgtcttttcagctcaagtgtttgttgattggccaggcgtggtagctcatacctgtaatcccagcactttgggaggctgagtcaggcagatcacttaaggtcagcgtggccaaaatggtgaaaccccatctttactaaaaataaatattaaaaaaaattagctgggcgtggtggcagtctcctgtaatcccagctaatcaggaggctaaggcaagagaatggcttaaactcgggaggcagaggttgcagtgagccaagattgcactgctgcactccaacctgagcaacagagtgggactctgtgaaggaaaaaaaaaaagtattttttgattgcctttgagaggaacggttgtatattactcagatttttaaaaaattgttcttttatggctgtattctttaagggattaaggaatgggcaatataagtgtatatgtttcaataaaaacgattagtgatcttctagtgagaacagtttaaatctatatttagcaattttttttaaattgtcaggtatggaagattttagagcaacgtaaagtccatgtagatttcactggcctttatattttttttaggcaagttaggaaatcaacattgaatcccaatgcaaaggagttcaacccacgttccttctctcaggtaggtttattactttctttgaggttatctagtcccaaaaaaagaaaaattattagtaatagtccttcttccatacctgccatctgaattttgttttagtgtgctgaaccaaccttctttcttttttttacatggccattaatgaatactttttaaacattaaaaaaaggtctttgttttgtcatcaattagatgtgatcttgggcaaatctttgaatttctctgacccagaatttgacgatggttggctagctaggctgtcaggtttatagatacgtcctctgcacctgagggttttgcatcactggattcaaccaaccatggatcaaaaacatagttaggataatctatactgaacacatgcagacgtttccttgtcattattccaaaacaatacagtaaagcatttaccttgttttaggtattataaataatctagagatgatgtaaagtatataggaggatatgcataggttgtatgcgaatactacatgattttatgtaagggacttgagcattccaagactttggtatcttcacagggtactgtaaccaatcccccacagatactaagagatgactgtactattgttattattcgactgagatcataagaagatatatttatttttaatttttaaaaacacttccatcagtttcttaaaaatagctgccactgtttttaatattttttaattgacaaagttttaagttcctactgaaacattttttcttttattgaaatgtgaaaatttatgtgctgtgtttttgttttcaataaaagggacatagttaaagcaagtaaaattagaaagactgggaaaatccgtctttaaattgcaataatagttcatctgttaccttgagataattgaatttattgttgtttttgtagccaaagccttctactaccccaacttcacctcggcctcaagcacaacctagcccatctatggtgggtcatcaacagccaactccagtttatactcagcctgtttgttttgcaccaaatatgatgtatccagtcccagtgagcccaggcgtgcaagtaagtcatagaatttgatgttcacttagcctccccaattgtttgtatctgacaccaagcactctttaggttttcagtgacttgagggtgtgatggttatgcatatgcatttgaaacagacaggcatgcagagattcagtgtgttgttaagtatgaggacctaaatctgagaatgttttctgtgaaaaagatggtttagatttactgtagtttggggtttgttccttttagctgtgggtatgatctaattttttaatgactaatggagaatcaggaaaccttctcatgcctagctctctagcaatataaaactaagagtgacagaataccttgttattatcataggtgcctaatgttaattttttttttaattctctcaagcctttatacccaatacctatgacgcccatgccagtgaatcaagccaagacatatagagcaggtaaaggtgagaataatcctgcctgtgtttgcttgtagtttgcatgctgcatgaattgagtaactaagtttataatgaataaatagttgtagtttagctctgactttttgatgaggctatgcattggcttttgatgaacaacattacatagatattcacatggattttatgaagaaaaacaggggagaaaaaatgcccatcagttgtgattatatagtatcctcttcaaaaagagtaattggaggcctggtgtgatggctcacacctgtaattttagcactttgggaggccaaggcaggaggattgcttgagctcaggagcccaagatcagcctggacaacagagactttgtctctactaaaattcaaaaaaattagctgggcatggtggcatatgcctgtagccccagctgtttgggggactgaggcgagaggatcacttgagcccaggaagtagaggctgcagtgagctgtgattatgccactgccctccagcctgggcgacagagtgagaccccgtctcaaacataaatactggctgggcatggtggcttatgcctgtaatcccagcactttgggaggccgaggtgggtgtatcacctgaggtcagtagtttgagaccagcctggccaacatggcgaaaccccatctctactaaaatacaaaaattagccggacatggtggcacctgccgcctgtaatcccagctactaggtggggctgaggcaggagaattgcttgaacccgggaggcaggggttgcagtgagccaagatcgtgccactgcacttcagcctgggcaacagagtgagactccatctcaaaacaaacaaacaaacaaaaaacaaacaaacaaaaaaaccagactaattggctggacacagtggctccatgcctgatatcccagctggaggatgacttgaacccatgagttcgagagcagcatgggcaatatagtgagaccctatctcaaaaaaaaaaaaaaaagttaattccaaagctttttgatctgaaatctgatttaaatctgaacttaaatttgaagaagagggtttgctagattaatttactagattgctaaccttgctttatatatacctacagttatttccccaaagccagaatttcttttgaagcagaggggcaactaacttcaaccaatgttaagatcctattagaaggatgtttcggctaggcttggtggctcacgtgtaattccagcactttgagaggctgaggtgggcagatcacatgaccgggagttttaagaccagcctgggcaacatggcaaaaacctatctctgcaaaaaaaaaatagaaatcttagccagccgtcatggtgtgctcctgtagtcctagctacttgggagactgaggtgggaggatcaattgaaaccagaaggtccaggctgcagggaactgtgactgcaccactgggctccagcttgggtgaaagagcgaaaccctgcctcaaaaagaaaaataagatggatgtttctgcattaaaattagggagttgtcgtataatgtagttgcataaactagtattctgtgcttgtgtggttaaagagccttcgtagaaaaaatcccacatttttcttaaaaggaaatcttttggccaggtgtggtggctcacatctgtaagcccaacactctgggaagccgaggtgggcagatcacttgaggtcaggagtacaaaaccatcctggccaacatggtgaaaacccgtctctactaaaaatacaaagatcagctgggcatggtggtgcgtgcctgggtgacagagcgagactccgtccaaaaaaaaaaaaaaaaaaaaagagttcttttaatgttggaaaatgctaaagggttttttttttgccaaccagttaatttagagtgattaactgctatcagttgagaaactatagaaagtagaataatttatacagaaaagacatttctcagtgcccaataattgcctttctgacataaagttttcatttttcctgaattaataagatttcctcaatgtgtttttttgggtgttttgtgtgtgtgtgtgtgtgtgtgtgtgtgtgtgtgtgtgtgtgtgtatgtgtttgatacagggtcttgctttgctgctgaggctggaacgcagtggcgctatcatggctcaatgcagccttgacctcctgggctcaagcgatcctcccttctcagtcccctggatagcgggggctacaggtgcacaccaccacacctagctaatttttgtattttttgtagagatgggttttgccatgttgcctaggctggtctcaaactcctgggctcaagcgatctgcctggctctgcttcccaaagtgcctgcgcccagccaattttctccatgtttgacctaattgtgatttcatagatgttaactaaaactcttaattttcgttttctcagtatgctattttttttttttttagccttggaacatatgaacctgttgaaagaactctgcctgaaataatgtaatcaaattatagagtttaatcttattttgagggcctttagaaattctgagaagaaagtgggtttttttttttactgccattttaatgtagtgttaaggtgttcatgtatcaccagcaggtgtagctgttttcaatgattacttaaaacaatgcaatgggaactttttgttgtcattaaaatataaaaggttactgtagtaagagcaagcatgacagtttggctatctgatgggagagtcacattctaacttcaggaggtactgtctttttaatagaaatgatatactcagagtctgggcacggtggctcacgcctgtaatccagcactttgggaggccgaggtgggcagatcacgaggtcaggagatcaagaccatcctggctaatacagtgaaaccgtgtctctactaaaaatacaaacaattagctgagcgtggtggcaggtgcctatagtcccagctactcgggaggctgaggcaggagaatggcatgaacctgggaggcagagctggcagtgagctgagatggtgccactgcactccagcctgggtgacagagcgagactccgtctcaaaaaaaaaaaaaaaaaaaaaatagtagagaaagggctttgccatgttggccgggctggtcttgaactcctggcctcaagtgatccacctccctcggcctcccaaagtgctgggattacaggtgtgagccactgctcctggcctgaatataccacttttacctatcatcagttgatgaacatttggattatttcctttttctggcaatgagtaatgcttttgtggattttcatgtacaaattttcatatgaggctgggagcagtggctcatgcctataatcccagcagtctgggaggctgaggtgggcagatgacttgaggtcaggagtttgagaccagcctggccaacatggtgaaatcccatctctactaaaaatacaaaaattacactggcatggtagcgtgcacctataatcccagctattcaggaggctgaggcaggagcatcagaatcgcttgaacctgggaggcggaggctgcagtgagctgagatcacaccactgcaccccagcctgagtgaaagagtgagtctcaaaaaataaaaaataaaattttttttcatgtggccttagattttcatttctcctaaagtagaaatgctgtgatggaactgccaaacttttccaaagcagctgcatcattttgtatttctaccagtaatgtacaagtgttccagtttctccacatcctcataaataaccgatatgtctttggtttgggttatgtccattctagtggttatgaagtgtcattgtggttttttgtttttttgtattgttttgagatcgtgcccaggctggagcacagtggcacaatctcggctcactgcagccttcgcttcctgggttcaagcaattctcctgcctcaccctcccagatagctggggctgcaggcatacgccaccacaccaggctaatttttatattttttgtagagatggagcttctccgtgcttcccaggctggtctcgaattcctgagctcaagcgatccccctgcgtcagcctccagagtagctggggttataggcgtgcaccaccgcgctcggcccatttttgtatttttagtagagatggaatttcaccatgttggccaggctggtcttgaactcctgacctcaaatgatccgcctgcctcaccttcccaaagtgctgagattttagacgcgaaccaccatgccctgactataggttatctttttacttgcttgatggtgttctttgtaacacagtttttaattttgatgaagttcaatttatctgtttgttttttcttttgttgctgttgctcctgatgtcatatcagacaaagcattgcctaactcaaggccacagagatttactcctatgaaacgcctataaaactcctatgatttttatagtttagctcttaacatttaagtctacaatctcttttgagttaatttttgtgtatgagatgagagtagtggtccaggtttttccttttgcttgtggatatccgttgtccccacctcatttgttgaaaagactattctttcctcttaaattgtttgtttgtttatttatttttgagatggagtgtcgctctgatggagtggcgctaacttagcttcactgcaacctccgcctctcagattcaagcgattcccctgcctcagcctcctgagtagctggaattacaggggtgcgccaccacacccagctaatttttgtatttttagtagagacggggttttaccgtgttggtcaggctggtctcgaactcctgatctcgtgatctgcctgtctcctggcaccctgggaggctgagaggctgaggtgggaggatcacttgagctcaggagtttgagaccagcctgtaccattatgcctggctaattttagaatttatcttaaagtataaaatgtgaatccaatttatcttgttctaaatgactatccaaaatgttttaaccagttttattagtctgtaatttacatacaagaaaatgctcatctttttatgtttacattttaatgagttttgacaaatatatttgctcatgtaactacttgcttcatcagtgaagatggaaaacattgtgcctgttcctcttctctgtccaactgtactttattaccactagctccagttaaccagtaatctgccttcttttactatagattagatttatcctctttagatttctttttctttttttttttttgattaggtttttttttttctttttttacgtaaaaaaatctttttttggagacgtctcattatattgcccaggttggtctcgaactcttgagctcacctcagcctcccagagtgctaggattacagatgtgagccacctcagccagcccctagattttttttttttttttaataaatggaatcaaacagcgtgtaacagaggtgttcaatcttttggcttccctgggtcatattggaagaagaattgtgttgggccacacataaaatacagtaacactaatgatagctgatgaacaaaacaaaaaaaaatagcaaaacttataatgttttaagaaagtttatgaatttgtgttgggccacattcaaagccgtcccaggacgcaagttggacaagcttggtatataatttcatatgtgtgtcctaaacagtgtagtaatttgaatttcatgttagtatcagcttattcctttttgtttgtttgtttgtttttgagatggagtcttgttctgtgtcccagaattggtctgcaattccactgcctcagcctcccaagtagctgggattacaggcacgtgccaccacacctggctaatttttgtctctctctcttttttttttttttttttttttttttagcagagacgggatttcaccatgttggccaggctggtctcaaactcctgaccccaaatgatccacctgccttggcctcccaaagtgctgggattacaggtgtgagtcaccgtgcccagccagcttattcctttttattgctgggtagcatttcattttatgattataccacagttaatttacccattactagtcgatgggcatttgagttattgccagcttttggctattatgaatgaagctgctgtgagcatttgtgtacaagtgtttgtgtttttatttcttttagttaaatacctagaattggaattgctgaggtatggtaagtgcatatttcatttttttaaaaaatttattttattttttatttatttattttttttgagatgaagtctcactctgttgcccaggctggagttcagtggcgtgatttcagctcatggcaacctccctgtcccgggttcaagcaattctcccgcctcagcctcccaagtagctgggattacaggcgcgcaccaccatgcctggctaatttttttgtatttttagtagagacggggtttcaccacgttggccaggctggtctcgaactcctgaccacaagtgatccacccgccccagcctcccaaagtgttgggattacagatgtgagccaccacacactgcctggtaaatacatatttcaattaataagaaactagcaatcttctaaagtgattgtgtcattttacattccaactgatcaggtacatgtgtaggttccatgtgttctgcatccttgccaacacttggtattgtgttatctttttaatttcaacaggtctaatgggtgtcttatggtatctcattgtgatcttaaatgtacatttctctgatgatgactgatccaggagcacctcatcatgtgtgtgtttgttttcagctgtcaacctttttttagtaaatggttcaaatcttttttccattttatttatttatttatttatttgatggaatctcactctattgcccaggctggaacgcagtggtgccatcttggctcactgcaacctccgcctcccaggttcaagcaattcttacgccttagcctcccaagtagctgggattacaggcatgcgccaccatgcctggctaattttgtatttttagtgtaggtggggtttcaccatgttggtcatgctggtctctaactcctgacctcaggtgatctacctgcctcggcctcccaaagtgctgagattacaggtgtgagccactgcgcctgtcctaataatttctttttgtctcaatgtttctgcctgggtgcactggctcacgcctgtaattccagcactttgggaggccaacctggatggatcatttgagccaacagtttgagaccagcctgaggaacatgacaaaaccctgtctttgcaaaaaaaaaaaagaaaaaagaaaaattagccaggcacagaagcgcattcctatggtcccagctacttggggggctgaggtgggacaatcgcttgagcgaggttgcgggggtttggagggcgatggaggggtgatcgaggttgcagtgagctgagattgcactactgcactccagcctgggcaatagagccagaccctgtctcacaaaaaaaagaaaaaaaagtcatgtttcttttcttactgtgaaaataaagttactacttttagtaaattattttaagttatttatatattctggttacaagtcctttctcagaatattgtgaatattttctcccagtctgcggttttttttgaagagccagtattgttaattttaatgaagccttatttatcaagcttttctcttaaggttcatgcttttttgtatcataataagaaatcttttacgtaccctaggttatgaatgtttttatggttaggtatatggttgatttcaggttaggttttgtgtagggtgtgatgtaaaggtctagcttcattttctccaccataaatatttactcggtttctctggcaccagcctctgttttccattggtggctttattttttttctgttcttgaaacaagagtctcgatcttgttacccaggctggagtgcagtagtgtgaccttggctcactgcaacctccacttcccagggtcaagcgattctgcctcagcctctcgagtagctaggattacaggtgcccgccactacacccagctaatttgtattttttttttttttttttttagtagagacagggtctcaccatgttggccaggctagtctcgaactcctgacctcaggtgatctgctcatctcagcctcccaaagttctgggattacaggcatgagccactgcgcccagccatagtagctttattgaattcagttgactgtattgtatgtgtgtctatttgtgaactgttttgttgtattgatctttgtatatatccttatgccaattctctctttattgctgttactttgtaaccaacctttaagttcatatgagtctcccagttttattctcgtcaaaattactcttattctgcgttctttgaatttgcaaataaattttagaatcagcttgggattgtgcactgaatctttatatcagttctgggagaaatatcttaacaatatggaatcttcattgaggtcatcatatactgctccatttatttaagtcttaagtttcaccagtgttttctagttttctttgtatcagttttgtgcctgctttcttaaatttatcccttaatatttcatctgttttgtgctgttgtgagttatattttaaaaactttcaacgtttgtttattcgtaaatagagatgcacttgatttttgaatattgaccttgtgtcttgatgtgttggtaaacccactgtttctggcagccctttaagacttaaacatacaatcatgatctaatcaccatgttggtgtttttgggttttttttttttgtcttattgtactggtgcattactgaaaaaggcatgagattttgccatgctcccatttttaggggtgagacattgtctttcactattaagcatacagttaggtgttacttcagttcctaatttgcagaggtgggtttgttttctttttaatcatgaatggttgttggattatgttcaaatacttatcatctactaagtatatcatattgaccaggaacagtggctcatacctgtaacctcagagctttgggaggccaaggcaggaggatcgcttgaggccaggagttcaagaccaacctgggtgatgtaggaaaaccccatatctacaaaacaatttaaaaatttgctgggtgtggtggcacacacctgtagtcctaactacttgagaggctgaggaaggagaattgcttgagcccagtagtttaaagcagcagtgagctgtgattgtaccactgtactccagcctgggtgacagaaggagaccctgtatttaaagtgtgtgtgtatgcgtgcgcatagatggatagataataatgtaattccattatggtcatacaaactgatatgaaatgccattttatcatataacaagtgtctttttgtggttgaatttgtttctggatttttcactctgcttcactaatctaataggactaccttctcatccactcactgccaacattgattttttttttcagattaccttgaattttctgtttatttttccatatgaactctataattaacttactactaaaaaaatcagttgcctttttaaaaccaactgatctttaaaatatatcttggctgggcccggtggcaggcacctgtaattctagctacttgggagactgaggcagaagaattgcttgaacccaggaggcggaagttgtagttgagttgagattgcgcacctgtactccagcctgggtgacagagcaagattccctcttaaaaaaaaaaaaaaaaaaaagaaacagaaaagataaatctttttacaataatttgttccaattagggtccaagtcaggcttgcaatttggatttgtttatatgttgaagtctttttttttttttaattgtttcatattgtggtaactttttttttttttttttgagatggaatcttggctctgtcacctaggctggagtacagtggcacaatctcaactcactgcaacctccccctctggggttcaagcaattctcctgcctcagcctcccaagtagcccagccttttttttttgagacagagtctcgctctgttgcccaggctggagtgcagtgatgcgatctcggctcactgcaagctccgcctcttgggttcatgccattctcctgcctcagcctcctgagtagctgggactacattcgcccgccaccacacccggctaatttttttgtatttttagtagagacagggtttcaccgtgttagccaggatggtatcgatctcctgacctcgtgatccgcccgcctcggcctcccaaagtgctgggattacaggtgtgagccactgcgcccggccttgtatttttaatagagatggggtttcaccatgttggccagcccggtcttgaactcctgacctcaaatgatccacccgcctcggcctcccaaagtgctgggattacaggtgtgagccatcgctctcagccttgcggtaactttttattacgaatgtattgagacattaataacctaggccagtcatgtttcatccctacccattgtctcttaaaagctttgagtccactggattattctgaagcaaattctagacattgcatcagtttatccaccaacattttagtgtgtatctttaagttggttttggttttgttttttgtttttgagatggggtctggctttgttgcccaggcttggagtgcagtagtgcaatcatagctcactgctgctgcgaattcctggtctcaaaggatcctccctcctcagcctctcaagtaactgtgactacaggcacatgccaccttgccagcttttcttttcttgtcttgtctttcttcttctttgtttttttgtttgttttttgtttttttttgagacagagtctcaccatctttctatcttgcccaggctagtcctaaattccagggcttaagttatctttctacctcagcctcctaaagtgctaggattacaggccagcactttaggaggtgctggatgagccatcacacccagccaagtcataggtttttttgtttgtttgttttttgagacagtgtctaactctgtcacccaagctggagtgcagtggcatgatttcagctcagtgcagtctctaccaattgggcttaggtggtcctcccacctcaacctcccaagtagctgggactaaaggtgcgcgccaccatacctggctaatttttgtattttttgtagagacagggtttcgaattcctgagctcaagcagtctgcctgccttgactcccaaggtgccaggattacaggcatgagccactgcactcagccctcacagttttaattacagtttttcccttagtttttgtcttgttcatatccagcttgtcttgtatttttttcccacgatctgaattttgctgactgtatccctgtgttgatatttaaagtagacttctgtcccctgtaatctttgtaaactgatagtaaataatgaaggcttgatcagattgggttttttttttttttccccaatgtttcacagatgtgtgtactttcagtgaggagtcatgtaatcagtctttttcctgataggagtagtcagtgagttcctagatgttttatctatccaggagataatatgtccctttagcgccttaatttttttggtgtgttttttagcagccattgatgataattgtctagcccaagatcagttatttccttaggggttgtaaaatggtgacattcttttcctttcatcccttcttcaattattgcctggaatatttctataaagaaaaactttcccatatccagctgtttggttaccctgaggtatagctttcttaggaaaagtaatttaaaatgttaatcatttccctttttaaggcagtcttcaaaataatgagttggttttctgttatcctccaaaggtaaccagtgaggtggtttttttgtcgttggttcttactatcagtataaacttctggaattttttttttttttttaattttttggagacaaggtctggctctgttacctaggctggagtgcagtgggatgatctgggcatactgcagcctcaacttcccgagctaaggcaatccccccacctcagcctcccaagtagctgggactacaggcaagcaccaccgtgcctggcttaatttttgtatattttgcagagacagggtttcaccatgttgcccaggctggtgtcgaactcctgagctcaagcagtctgcctgtgtcagcctcacaaagtggtgggactacaggcatgagccaccatggcaggccagaatcacaataaacttataaattaacttgagaagaaatgattgatgtcttcatgatgttgagtcttcctgttcaagaacaaagtataccttcaatagcatattaaagtttatccttggctggatgcagtggctgacgcctgtaatcccacctctttgggaggcagaggtgggcagatcacctgaggtctggagttcgagaccagcctggccaacatggtgaaaccccgtctctactaaaaatattttaaaaaaagtattagctgggtgtggtgtgcacctgtagtcccagctactctggaggctgaggtaggagaatcgcttgaacccaggaggcagagagtgcagtgagtcaagattgcaccactgcactccagcttgggcaaccgagcgacactctgtctcaaagaaaataaataaataaaaataaagtttatctttaaggttttgtacatttttttcagtgtatgccttaggtaggttcttttttaatgttagtgtaacccagggacttctcttccattgcatcttctaagtaattacttatgaagtaccatatatgaaggctattgctgtttatatgttagtttttaccctgctcctttactaaattccaatcctttgaggtattggataaaaatatttttagcatttttcaaataacaggcagagtcaagggcttggtttcttttcttcccctcctgtcccctaccctccccttttttgagacagggtctcacttcttcgccgaggctggagtgcagtggtgcagttacggcttaccgcggcatctgcctccctggctgaaaagttcctcccacctcagcctcctgagtagctgggaccatagatgcacagcaccgcagctggctaatatttttgtattttttgtggaggcagtgtctccccatgttgcccagggtggtcccaaactcatgagctcaagcagtccgctcgccctggcctcctaaagtgtagggattataagcgtgagccactgcgcctggcctggggatcatgttttaacatgagaattagtggagacaaacacatgatatctaaataatagcaccatagtatacttgactagctttttaattattttttaaatatacaggaaggtaataagtaacaaagtaataatagtgaatagtttaagctcagttagcataatcgggcaaactttcatttgataaaagtgataagtagttttcagtggcttttttgtttaccagaaggaggtggtttttaaatacgtgcatccaagataaaatataaaaaaatgttcaggtttgctttcctacatagataaaataatatgtaactagctctcccaaatttcagcaacagttagtgaatgtttagccacaaatttgcagttaattatataatcagttcttaggattttatgaacaagttctatattctttgtgccttatacctagttgtaagcagtcattccacaattattttcctgaagtggcttggttaatgccacaccagaaacaggtcacagacaatagtgctgtaagaaatgtgtgaggaaagaggcacatgggaagtagctagctcgtgctggaggaactggaaaaaaacctcacatgggagatgacagttgagctgaattcttaactagagttgtaacagggcgaggcccttacatgcagaccacctgtgtggattaagataagacataaagtaatcttttaaaagaactattatttagaaacctggtatatgctacatggtgctgtgttatactgggtttgagaaagaatgggaagtgttacaaggattcagtggttggaaattaaggaagatagaaagttagtgttggatctgttttggctctttggtcatgcctttgtttttctcaaaatgaatgcagtgcccgtcccagaaaataccatatgagaagcgatttcataatgctgtgagagtctgttacagggacttgatcaagtctgagggccatgagagaaagtccctctgaggaagttgctttcaagctgacacctgaaggatgaagcagaattatcccagctgggatttgggaactggtgtttgaggctgaggactagcatgcatgataggaaaataacccagagtggcagaagtgggagtggtatgagatggcatcagagacgcagattcagggtcaaatcattcagagcctcctagaccatgtgaacacatgtattatgctgtggagatactgtttaataggcagtctgcttttttttctgcagtaccaaatatgccccaacagcggcaagaccagcatcatcagagtgccatgatgcacccagcgtcagcagcgggcccaccgattgcagccaccccaccagcttactccacgcaatatgttgcctacagtcctcagcagttcccaaatcagccccttgttcagcatgtgccacattatcagtctcaggtaaggctggtaaggcctaactcttaatttttgtaccatataaaaaaacttttaatatggtaaagggattttcctttataatttttgcttttgtgtgatggtagggtagatagctaaggacttggggacccttttcaatatatattcgaaggttactgatgattgtaagaggttcagaggaaacagccaagaaagatttgagagtttacagctgtttctggaaatctggaaaccatggagttaaaaatcttaactaaagtctgcttggctctatttgcagtgttaatgtgctttctttattttttgtttgaacacagcatcctcatgtctatagtcctgtaatacagggtaatgctagaatgatggcaccaccaacacacgcccagcctggtttagtatcttcttcagcaactcagtacggggctcatgagcagacgcatgcgatgtatggtaggaagcactttgtttgtctcttccagtgtgtgtgactcttcttaatttaagtttctgaaaacatactctatctaagaataacctgaccttttatgacattgagggtcaagaatctgaaggaaaagatgaacccatttctttgcctgacttgctttataacttttggcaaatagtttctacttctgtacctggtcttcagatctctttcctgctttaactaaaatgtaatgatgtatataatggcaaagcatctttgtggagaaaggtacctttctcctcttcctcatcaatattatgctttggtatatcctgcctacgacatgcaagagaattttataataataaaagcataaaggtgttctccagcatgaaaacattttgcttcactacttgatctgagggtcactggcattacatattttttttgctgtttgttataatgataatactatgtttctacatcatgctgtattttaatggttgaatattatgtcatattagatatattttagacatgagtcacactttaaatataaccaatgtgaacagaatgctgaaatgaaaatgagaagtattttatgtaaaactaagcagtatttatatgtgagaataataagcaaaaaaacccatcttcgttttgtgactaaacagagaaatttgtgtagatcaacttagcagctgtctaaagtaccaaaataatagatttttcactgttgataatttaaaataaaatgtccatttgtatatcttatgatacagaattaatggattgcttcaaatgtttttcagaatatgtttttaaatagtactgatttcattaagatgttttgttctgaatatttctgagaactaccgtagtgtcgtttagttttcctatttgcgtttttggttgtttggagtaggggataattttggtttattcatacagttgaaaagtgtactgctatgagaatgagattatggttacatgtaactacatgggcatttcatttttaaagcctctttgaactttttgaaatactaagaatataaaatttttattttttaagtttagatgtcctgaacgagtatgtttaggcaaaattgagttatttaagaatttataggctgggcgcagtggctcacgcctgtaatcccagcactttgggaggccaaggctggcggatcatgaggtcaggagatcgagaccagcctggccaacatggtgaaaccccatctctactaaaaatccaaaaaattggccgggtgtggtggcatgtgcctgtagtcccggctacttcggaggctgaggcaacagaattgcttgaacccgggaggcagaggttgcagtgagccgagatcgcgccactacactctagcctgagcgacagagtgagactccatctccaaaaaaaaaaaaaaaaaaaaagaatttacagatttctggcaaaccttcttcttgagacattactacttttcataccacctctgtcctttttgaagaataaaagttttaacattccgtaggttaatgagaataggacttgggcagcagcaatcatccttcctgtcacctgtaacccacagcttatgctttcttcctggaggttcttgtctgccacaaaggctcactgctgataggaatttgtatatgatcaaaggtgtttagttttataaaacagttaagtccagtcttaattttccacattatcactttcaattttgtattgtggattacgcattttaaataaaaaattgtgtgattgctacattttggaaaacatttttttcaagaggcccatccgtaatttaattgtaaaagatactgacaaactaacttggtttattattttggttatgaccccgtcatttgacttgtctttagttgtcttaacggggactgaatatgcgtgcaaaggcacgattgatttatcatgctggcttttatgcaacttgtatatattttaacaattttcctgtttgctaaaggcttaggttaaaagttcattatgattgtttatacatttctggtgaatacatcatgatttaacaagtggaaagaacatctctttccttccattttctggcatactccccttggaatcagatctgaaacttttaagctaaaatttccattgcatttggagagtagttatttgtgtatgcatgcttttgagacattgtagcaataatactgtaatgttgagccgaatctttctcctcattgtgttcattcactgccaacatctggcttcatcttttggatgaatgttcattggttttgaaacagcctatagggtaaatactgtgtttgaggtacagatgattttcataactacttcctagaacatgtccatttgaagagcagtggggccttagaccccaaagtccatttatgtgtgggcaaataggaaatgttgcaaacaaaacaaagcactagatctaatgtccagtgaaatctggaatgaactagtcattagagccggttctttcatgccaggaaaaagttactcagccaaatctgaactactctcctgcagtttacacaggtggtatttaattgctgtctgtatggaggcaggctaggagcaaggctgtggacttgttgtgattgtcactagttaatcaagattccctttgtggtgcttaagaccctaaaaaggacactaggagctgggcatggtggctgacacctgtaatccaagaacttggggaggctgaagtggaggatcgcttagcccaggtgttcaagaccagtctaggcaagatggcgagatcccatctctaccaaaaaaaaaaaaaaaaaaaaaaaaaaaaagcccagtcatggtggcacatgcctgtagtcccacctacacaggaagctgagatgggaggatcacttgagtccaggactttgaggctacagtgagctatcatggcaccactgtaatccagcctgggtgacagagcaagaccctgtctctatttaaaaaaaagaaaacataagaaagaattgttttgttctatgccatcataagccataatttaatctgcttaagcatgttcttcattaaatctgcagtgatttatttgaattattagactttcaaagccttattatatcaaatataaacaaaatttgaagtacattcttataaactacaacaaacttacatagaagtgttaattttatactcatcttccctgaacaatttatattttataaatatattaaatatattgtaataaattttctcaaaggaaccaaatactttgagtatgaattgtgcttttctttttaagctacatcatatctaggtttttaaaacatttaatgcaaacagaagaacatgcacccagatgttggtgacaattttatgtcaccttttctcattcattaattgttatagccatagccaaaggcattgaaaacataggaccactaatgactgcaaaatgaaatcctgattattgtttttaaatttttagtatgtttaatacacatatgctaacattactgaacagttaaatgataaaataggataattattttattctaaaaaagtattgaccttgacctctttctagctatcttagaaagggcttttgtcaaaaaccttatctctttgatgtctctttttttgagatggagtctctccctgtcgcccaggctggagtgcagtggcgtgatctcagctcactgcacgctccgcctcctgcgttcacgccattctcctacctcagcctcccgagtagctaggactacaggcgcccgccaccatgcccggctaattttttgtattttgtttagtagagatggggtttcactgtgttagccaggatggtcttgatctcctgacctcgtgatccgcctgcctcagcctcccaaagtgctgggattacaggcgtgagccactgtgcccagcctctttttttttttttattttttatttattttttattttttttttaatttttgagaaggagtctccctctgccacccaggctggagtgcagtggcgcgatctcagctccctgcaaactccgcctcctgggttcaagcagttctcctgcctcagcctcctgagtagctgggactacaggtgcccgccaccacacctggctaatttttgtgtttttagtagagacagggtttcaccatgttggtcaggctggtcttgaattcccgacctcaggtgatccacccacctcagcctcccaaagtgctgggattacaggcgtgagccactgccccggcctctttgatgtctcttaatctaacttccatcattgcctctaccccatcccttctaagaagttactttaattttttttcctctcacatctactctttttttttttttttttttttttttgaggtagtctcactctgtcacccattctgaagtgcagcggtgcgatctcagctcactgcaacatctgcctcccaggttcaagcggtttttctgcctcagcctcccgagtaggtgggactacaggtgtgcgccaccacgaccggccaatttttgtatttttagtagagacggggtttcaccgtcttggccaggctgatctcgaacttctgaccttgtgatttgtctgcctaggcctcccaaagtgctgggattacagatgtgagccaccacgcccagcctcacatctactcttctaatccatctaattttgttttatggtgatgcttttacctttcagaaacagtaataatacaacttttccgactaactagagccattaggaagaattagatccagaatccttttttgatttgtttttggtagtttaatgcagataagtaagaaaatatagttaagttaaaaaaaaaaaaaatgaaaagcatccataatccctccacctgacaactgccttttaacattttgatgtgtatccttccaggtgtatttaaatacactcaaataccctacccctttatgtagacatgttttaataagaaataatattcatgtttatattcttgctatgatcctaaatttttggatccattactagataatctttcaggataatgacatttccattagtaatgtttttgcaaaattgtgtgtctattgaattaaacttgtaaaatagttttattttggtacatgatttatatcaaggttgttcagtagaatgccatgttggtgtttttattagataatgattttattccttttacttttaagcaagtcagcatgacaacttgacacctaagtacagaagaacagtgtcttccggtttagtcctttcttttaaaattctgtagcagtgtttaaagtgcttgtcatctcttatgaaaatgaattatgcatgaatacaaaaagaaattactaatatgtcaacctttccagaaaatttggaaaatgcacacctcaaaaggctaatttacctttctatttcccaaattcagcatgtcccaaattaccatacaacaaggagacaagcccttctttctactttgccagtgagttgggttttttatactaatttttaattgtacagtaaaacactttttaaaggatacatgttaagggagtagacttgttgaacaatattttccttgtgccagtcaaattattgaaagtacttatatatataaataattcagtttttaaaatggaaatacccaatttaagaaggctggagttaatgaaaaatggagttgtttcagaaatcaatttttgcataccaagcaaatgtgactgggaaatgcctaatattttccttgttagagaaacttcctaaacagctttatacacacacacacacacacacacacacacacacacaaacacacacacccaagccacaagcttggtataaatttaaaatgtttatttatacacacacacacacacacacacacacacacacacaccccaagccacaagcttggtataaacttaaaatgtttatttatattctgataagatgaaatttatgcctaccaggatttttaattgaataggattgatgaaatactaagggaaaaacttttcagtcctgtgcatggctaaaggtttaaaatactcaggaagggccaggcacggtggctcacacctgtaatcccagtgctttgggaggctgaggcgggtggatcatctgaggtcagcagttcaagaccagcctagccaacatggtaaaactccatctctactaaaaaatacaaaaatcagccatgcatgctggcatgcgcctataatctcagctactagggaggctgagacaggagaattgcttgaacttgggaggcagaggttgcagtgagccgaagtcgtgccactccactccagcctgggtggcagagcgaaattctgtctcaaaaaataaaatattcaggaagcagacccctcaggatatcttgagcttaagcaagagatcatgacctctcaggtcattatcttggacagcacaggtcccctctccccacctggcaaaaagtacagaaatagttgctccttcatggagaaagtctgggcagagctttcttctggaaatgaacttttaaggtacatttttcctatttgtagggcaatttgtaaaaataagggccggacgtggtggctcacgcctgtaatcccagtactttgggaggccgaggtgggtggattgcttgaggccaggagttcgagaacagcctggccaacatggtgaaaccctatctctaccaaagcatggtggcacgcacctgtagtcccagctacttgggaggcggaggcacaagagttccatgaaccctggaggtggaggttgcagtgagctgagattgtaccactgcactcaggcctgggcaacagagagagactctgtctcaaaataaaaaataaaaataaggctagtcttggactttggtatttaaataggaaggagtactaatatttgtagaaatcctttagaaatttgtgccattaatattgtcaccttgtatgaaatgttgtgttctagaggatattaaggattcaaattttatgttaggcacattttgagttattttggggtgactcaatgtctgactctactaaatgccatattagcatttaaaatgcatttgaccttaaatctttgttaattatgccatgacttggtatccaaaaataagctgatacatacatacatacatatatgtgtgtgtgtgtgtgtgtgtgtgtatatatatatatatgtatgtgtgtatatataatttatttggtgctaggaaatgttaaatttaatcctttaatagatgctctttaaaaaggagtcttgctgtatgtatatactattaaaggggaaactatgtctgtgattgtagtgtgtaaaagatagtaggtgattttattatgtactcaatttgaggtctcaaatgtagttatcctcaccatcttactgtctctgttagtagtttggtgttgttttcctggtaagtagctaaggtccttaatcattaacacctaagccttaattgccttagcacaacttcccctaaaagggagtatcagtactttttaaaagaaactaacagttgggctgctaatttaatctgctgcttcatttccccctgttctaagccattttatgatggtttggtcaagttgccttttattccccttttagagttttcaactttccttcacttccctttttctgaatttaacatcagatttacaagttggaagattttgttttgttttataagttttgcaatgctggtgatctcttatgacttgtgcatccaaagtcaaaatgacaaaacctagttacaaattaaacacacagctttctgtacttaatttgcttcagtgagatcacagctgaggaaactagttctggaatgtggttagtgttattaaggatttttgactgatcatatgtttagaatcttaaatatttatgtcaaggaacactgagtgggaaacttctggactaggtctggaccaaagaagcatatgtctttgattatctttaatctaaaagattttatgaagactaaagttttataaatagaagtttaactgatgaataaatcagtattacaaataaaattaactttatttttaacctctctgggatctttagccagaatgagcatatataacaaaagcagtgaaataatatgtgtgggtcagaacccactgcccttcccactccactctccttttccctgattctcctgtgttttttccttctttaccttatcttggttcctttttttttttttttcttttgagatggagtctcactctgtcgtccaggctggagtgcagtggtgcgatctcggctcactgcaacctccgcctcctaggttcaagcaattctctgcctcagcttccagagtagctgggattacaggcgcctgctgccacacccagctaattttttttgtatttttagtagagacagggtttcaccatcttggccaggctggtcttgaactcctgacctcgtgatcacctacctcggcccctggttccttttttgtctctcttgtcttccaagctatttttttccttggcttttaaattttcttcctaccctgctttgtgtcactgtcacttaactggcctatcaaggaaccgaactgtatttttgttactagtattgatttaaagtataagtttcacatttctcccaatttattattattatttatttatttatttgtttattttattttttgagacggagtttcgctcttgttgcccaagctggagtgcaatggtgtgatgtcggttcactgcaacctccacctcccgggttcaagctattctccttccccactctccctagtagctgtgattacaggtgcctgccaccacgcccagctaatttttgtatttttagtagagacagggtttcgccgtgttggccaagctggtctcgaactcctaacctcaggtgatccgcccgcctcggcctcccaaaatgctgggattacaagcgtgagccaccgtgcccggctccatttctcccaatttcaaattcaaggaggaaaagaattcctgattaaggtacttctttcagatcttttgagctagaacaaaaaaacaaagggaaatatttctaattaactctttttaaattttgtttacaacgtatgatacatattttacacatcctttgtggtttttgttcgtcttgtttttaatcaatgccttgcaagtttaccggtatttaggtagggaaaggattttgtttttgtttttttaaacaaagcctatgtacattcactcagcttgggtatttgtgctatgcatgcaaattagctatagattagaaaaccgtattatagtctttaaatactggtaaacttaaattgcagagatgccttttaaaaatgcatagtaaaaatatttcatctttacttttctcttcaaatgattttaagatttttacatttttccagttgatgaataacttaaattatgagatttcatgggcataattattttctatatttattgttactttttaatattcttaatactttgcttagaaggtatttaaaagtgaaatttcaaactttttagtacaaaatttcttgaataaataaagttacaaaaaaaaaacaaaaacctctgagattccgtactgtatctttatgaacctccatgaacagaatttgggatttgggaattgcttttccttagacagatttagattgttacaaatgacatttttaagaggctggggtggcggtaggggttagtgctaatggtttaacagtaggggaccatggacaactgtagacatcactatccagtagaacattttgtggctgggcgcggtggctcacgcctgtagtcccagcactttgggaggccaagacaagtggatcacctgaggtcaggagttcaagaccagccagaccaacatggtgaaaccctgtctctactaaaaatacaaaaaagttagccaggcgcgcctgtagtcctagctactcaggaggctgacacaggagaatcgcttgaacccgggaggcagaggttgcggtgagctgatatcacgccactgcactccaccctgggcaacagagcgagactccgtctcaaaacaacaacaaaactgcactgtccaccgtattagctacttagctacatgtggcttttttattattcaaaaataaatttttaggccgggtgcagttgctcacacctgtaatcccaacactttgggaggccgagatggacggatcacttgaggccaggagtttgagaccagcctggccaacatggtgaaaccccgtctctactaaaaatacaaaaattagccaggtaatcccagctactcagaggctgaagcaggagtatcactttaacccaggaggcggaggctgcagtgagccgagatcgctccactgcactccagcctgggtgacagcaagactgggtctcaaaaataaacaaacatggccgggcgcagtggctcatgcctgtaatcccagcactttgggaggccgaggcggatggatcacttgaggccagtagttcgagaccagcctggccaacatggtgaaacccgtctctactaaaaatacaaaaatcagccaggcatggtgatgcttgcctatagttccagctactcggcaggctgaggcaggagaatcgcttgaacccgggaggcggaggttgcagtgagccgagatggtgcccctgcactccagcctgggcaacagagcgagactctgtcaaaaattaaacaaataaatacatttttaaaatgaacgtaagatttttacaagtacaacaaactcaggttcgaaatttacatcaaatcttttagaccaagtcagtgcctatacaacttggaggagctggaagtaaacttaatgagtatgatgatgatggagggcctgttaataagccaccaagttagaaaaaaaggactgtcttatagacttatgggactgtgaagctcaggaaggcttcatcgtttgtacatcatttgttctagctcccagaagacgttcactactcttaaaaacattcagagactatgttgccacagttttcttgttaaaatattctggcatatgttaattcctacagtctggaaaattttcccagtgtataaacaaagctgctgtatccagtctaaactggatatgaaggaatattaatgccagctgtggcattggcagtggatgcacaggtgatcctagaactggctctttgccttgccctttcccctgctaagagatagctttgcagctggagacgtaactgttagggctggagagttggtggcccttagccctacaacacctaggattatagaactgctccatgtgcctagcctaaccctctgcacaccatttacgtggaatatacccagagccgtctatgctggtgactcggcagccttgcctaccagactgctggaactagggtgcctcttcccaaagctgtgcttgcttctctcaccaatcagtcctgcatatgtctgtgtttgctaacacgttatatgaagaatgtggggaactattttggaatcatttctgtgtatgggcttattatcttgagggattttaggatttgtttctcaagagagggctgggaactataccttgctagagttgtcttgagaacgctctattctcagctcattgcctcgtggaggttagttttttatcatcggtgtgctgtccatagtcactggaagcagtgaacacatcctactctgcttctgattctcaacttactgtttttgaagcacatgaacaggccaggcacggtggctcacgtctgtaatcccagcactttgggaggctgaagtgggcggatcatttgaggtcaggagtttgagatcagcctggccagcatggcgaaaccccatctctactaaaaatacaaaaattagctgggcgtggtggcacatgcctgtaatctcagctactcgggaggctgaggcaggagaattgcttgaacctgggaggcagaggttgcagtgagcctgggcaacagagtgagtgagacttatatctcaaaaaaaaacaaaaaacaaaaaactgaaagacatgaagaaatggtttttgtaccaaggtttggcccacgctgagattcacaaagaactggctttcagttcttatctttattttgatttaaactggcccatcatgttgtcctttgaagttagtctagtaaatttctttccaaagggctggggcactcagaagggagtttacttttctatatttatttcataaagcaaagatgggagatcctccattagggcttgggaaagtaaactgagtggcagaagggctcctgtgattagctgagagagactgtggtccttcggccctgatgatagatccctggccttgccacataccatacacagtgcccgcacccccatcccccaccacacccaatatagtctgtgccctcaggacattgctccagggcagtagcatggtgaggttagcctgatgatggccttgagctaaagagtgtgcacctaaaatgcacttgtttgagtagtttctgcctatgccttcaagttgcctttttgggaaaacctagtgaccgttaagagtaaatgcaaactaatttgattttaatatcatatgtagagctgtattatatgaaccaaatgctagtctgttaagcaatagctacacttattttttcaagacaatggatggtttaaatggagtcatctatagaaattggtagtggcgtgagttatgcattgtaaccatcaagaaagttcagttgatgaagtgtagaggagcgatggaggttgtcagacatcggttgtgtacatgctcctttttctttcactttagtttccacgggctcccttgctcagcagtatgcgcaccctaacgctaccctgcacccacatactccacaccctcagccttcagctacccccactggacagcagcaaagccaacatggtggaagtcatcctgcacccagtcctgttcaggtaagggcaactcagaggtctgcatggagtggcttctttatcctagtatctgagtgctttcttcaggtgccaggtatcgcatcgtcagaacacatggcatgtccaccctcgtgaagatggatacagctgtgcccctggggtggtggttttaagaatcacatttaaaggctgggcgcagtggctcacgcctgtaatcccaccactttgggaggccgaggcgggtggatcacgaggtcaggagattgagaccatcctggcgaacactgtgaaactccgtctctaataaaaatacaaaaaaattagccgggcgtggtggtgggcgcctgtagtcccagcttctcgggaggctgaggaaggagaatggcgtgaacccgggaggcggagcttgcagtgagcagagatcgcgccactgcactccagcttggacaacagcgagactctgtctcaaaaaaataaaaaattaaaaaaaatcacatttaagatacatgttgataataaggtgattggataagctctggaaacttgcagtaatgaaaaatcaaatttaacataaagttcataaggcaaattcctatttgcttgggactttttaatttctaaggtttatgtgatgaggttattttcctatgagcttcttgaattatgtttgctaatggaggcagttaaagatgtctttgatatctatcagttccctggggcagtagtcttttttgactttagtatgtatgctcagaagtttctaactgccagactgagaatcaggcttctgtaccctagaaaggagttgtccagatgggaggcacctccagccttgctcttaccaccctgtacattctcctgtactttccagtgaccctcatcataggcccaagtgtgcaaagcttagctttgtgggtatcccttggctgcttttcattaaagaagttttcctctcaattctttcctgtcgctttgcagcaccatcagcaccaggccgcccaggctctccatctggccagtccacagcagcagtcagccatttaccacgcggggcttgcgccaactccaccctccatgacacctgcctccaacacgcagtcgccacagaatagtttcccagcagcacaacagactgtctttacgatccatccttctcacgttcagccggcgtataccaacccaccccacatggcccacgtacctcaggtaataccagctttagccaactttctgtgaaggccaagtagaatgtgaaggttatcagtaagcagctagaggctctcccagctaggaaaccctgtgtgtcatgccatttgcctgtctccctttccctctcaaatacacgtgatctggccctaagggaatgtttgtgtggttttgtcatgggatcagtgaaggtgctgattggtcagtcctttagttttccaactgagaccttaaaaatatctttgactctggaatgcaacccagtccttctttcctttctgtgtctgctttgctatgtctatatagcctcactactatatatatgtgtacatatatattcccctacacacttaccttggaagccaggcagggatgatggccttcacagagtctcagctctccgaagtgactaccggggcctgtcaacttgattgttactcacatgagttccagacacatctctccaattgttttccctggttatccatatatctgctttgaccataagttgtactcttgagagggcttggccttggacattggtgcagtgtaactagaagctggaagcacccaggtggtcccatttttctttaagagcagccctggaagcactttggagctcacctccagtgtaagctgctacaggtgaaaggtgtgcttgccatctcagtggttgctgtctgcatcagctgctgacaaaggtccctgcactccagggcccaggggattgtcttaatgaggagaaggagctgcactgaagttgggctctaacgctggccttgaggccctccctggggctgttacgggtgaattggctgtattagatgtctctgctactttcataacagaactctctgaggcgggtctaagtgagacctgccacaatgaattccatttcctgttaaatagtgcgccagtgaggctctggcaaggtgtgggctagagatgcgactcagttggatctatctctcagaaggctaccttgtaagtagagttccacagctctgggaagtttgggcgtcctcaccctgcaaagtttaggttctgtggtgtagcgcactgcagttgatttgctttttgatagtggggagggaagccggtttggtccgtgtgggccagcgtggtttggtggagtcagcttcataagagctggggtcctgtaggtgtctaccagaggctggtggctaagtaggcatgtgaacttacatgtaagtcagggatccctaaaacctcactctgtttttgtgctgaaagggcaaaaaggttaacacagggaagctcaaatttgccatgtgcccgtttgaatatgtgagagtaaaaacggcatttcatccaaggcttatcgtagtctagaacagtgcacagtgtgggaaaaaggaaacaagggctcttcctggccctgccaaccccctgcagagctggaatccagctgtttgggctgactaaaatcacctttccaacttgacagtgagtgagaccaggttgaacttggtacagagacgctgggctggcccagatgacttcaggttactcctttccatctcactggagccattaaaaactccaactcctcctcctcctcctgctccatcagcatatctctgagagagtcacgggggcctaagagtctcttttcactgcctggtgagcagaccagaagcagagggagagaggcaaatgaacagaggtccaagtaattcacatacttgactgtgacagtctctgcttattaatgtaatctgttttcctatttgaaagggatgttatctgcaaaactacctcaggccccacatggcagcctgattctgaagcatcattgaatcttgtatgatattaagttgagaaagctgcccttggatccagtgtctaatctttgtgaagatcttaccccatacatagaatacaatgatcagaaatgtcaagggttaggacagcacagccctgacttctacccaggctcacttgttgcctgctccctgacccttgcaggatctgcccaaaggtgaagcgcgtcttcaggtcaatagataatctactagagattgtccccagagaacagaactgggccctgaggcccaccgttgccctttcctgagagtcccagcccagtgaaaggaacacagttgacatgttgttgaagccggagatgttgcctgtatgcgtaaaagagctctctgtttcaggctcatgtacagtcaggaatggttccttctcatccaactgcccatgcgccaatgatgctaatgacgacacagccacccggcggtccccaggccgccctcgctcaaagtgcactacagcccattccagtctcgacaacagcgcatttcccctatatgacgcacccttcaggtgaggcgtgtgtgtgcaggggccgccggggcaccccaaagcattctgctcgcacaggtggaatggcaggcagggccagtgcttcaagccccgcatttgagaactagcaagacccgtccaggagtgtgcacaggagggactgtgacgatcagttcagcatcagggcctgaggcttccgggagccgagtctgtgtgtgttctgatggtatacaggatttggcttgatgagaagcagcagcagcagcaacagcagcctgatgcatgcctaggactcagttggccttccttgttatgacaggctggacagggcagtgttttccttcctgagtcccaaaagtctgacatgtggggggttattaccatggcagagtttgattgtagctctggagaagatactgctgagaaagcgctgtggatggactggctttgagtgtagcgttagccccagcccctgaacaggggagagcgccctgtgattgtgctctactacttgatggctgccatggcgatacttcacagtctgacctgttattctgaaagcaatactggtgcttggctaatatttggggagggggtttgttaaggcctttttttctaccccatgaacaagtcttctgggagttttatctgaagtggttttacgtctgactggtttgtttctacccacccacccaaccctccccactttggtgcagatgggagggggaaaagcgaattcaattttgagttttgttcagctagcacgaggatagtttacaatcatgtgctgcagagacactaggctgatgtgtggtgttgccagttttctgtttcaatgttcgcttttctttttacagtacaagcccaccaccaacagcagttgtaaggctgccctggaggaaccgaaaggccaaattccctcctcccttctactgcttctaccaactggaagcacagaaaactagaatttcatttattttgtttttaaaatatatatgttgatttcttgtaacatccaataggaatgctaacagttcacttgcagtggaagatacttggaccgagtagaggcatttaggaacttgggggctattccataattccatatgctgtttcagagtcccgcaggtaccccagctctgcttgccgaaactggaagttatttattttttaataacccttgaaagtcatgaacacatcagctagcaaaagaagtaacaagagtgattcttgctgctattactgctaaaaaaaaaaaaaaaaaaaaatcaagacttggaacgcccttttactaaacttgacaaagtttcagtaaattcttaccgtcaaactgacggattattatttataaatcaagtttgatgaggtgatcactgtctacagtggttcaacttttaagttaagggaaaaacttttactttgtagataatataaaataaaaacttaaaaaaaatttaaaaaataaaaaaagttttaaaaactgatcaagttagtgtgtgtctgtataagctacttctttgtaggatacttaatatcaaagcaggtgtgctaagggtgcattttgaatatcccggaaggtagctgtgaaatgatttttcttcttcacccttagttctggttcaaggtatctctagaaaaagacaagactgagctattctctttggtggattagagatctgcttcaggaggaggaaggttggccagagttgggcagcactgaaattccacatcctcgggctgacaccgattctgtaagcttcctttttaatatctcctgaaccaaaatgagtgtcattagctggaagttcccaattcgggcatttttctactttaccagtagggggcaggagacactcagaaaaaaattgcaataaagaaatccagagggcatgaaggctgaaaagatacaaagatgtacaaagctgcttattgacatggatggactcataagcatttgttagtattcccagattgcaacggggaggacaaagggaagagcgagtatttgggcagggcaaggattttgtagagacaccatggtcttaatagagcctttaaatattatgacagcaaatcaagattctgaaaactttttaattcacatatagcaatttgtacattatagcaaaatttgcattattcaagaataagttacttgtacagtacataaaacaatacataaaaatttgccaaataccttctgcctataatgatacaagatgaatccactttatgttatcacaatgtgctgtatattctaaccaaacacaggatgtcagatgtgtccttgttaatatactcgcaagttcctctagcttgtgggagatgttagagctaacacatttgcagtaagggacttagtcctgaatagaaagcatgaaggaatctcaggcaaccctcagggaagagtccaaggccttgactttaggttaagaaactgttatgtaaaaatagtgttctctggcccaagattttaatgattgctattcctttttcctacggtccagaaatgatcaaaggcagaagatttataccagataaagccatatggattgctggtctaaaattcaaggcaggttagttgacttaattctttggtgctggtgactgttagtttgtaaaagttcaataagtcagatgaaggaagggatggtgccgggagctgtcaagctgtactggtggggtctgtaattagagctaactggagggatcatgatgtctactgtccagtttggtgttgagccatggctctcggtagaagttgccggctggggcctggtcaggactggaaggagagtggtgggatgtgctgtgcctatggtgggctagctgcagccagtggggtgcctgccccacactgctgcccaccccttcatcagctgattctgctcccacataaagaaaggtgttggcttagtgtcacttcttcctagagccatgggagttttctgtcagcatgtttttgagctgtcctggtaacttggacgggaagcagtctggaggtgggtgccttccaaatctctgccacagaa

SEQ ID NO: 3-9 - skipped (7 entries)

SEQ ID NO: 10 - DNA, 26 bp, synthetic construct
  source 1..26: mol_type = other DNA
atatggactccagttatgcaaaaaga

SEQ ID NO: 11 - DNA, 22 bp, synthetic construct
  source 1..22: mol_type = other DNA
tcgccattcactttagcactga

SEQ ID NO: 12 - DNA, 19 bp, synthetic construct
  source 1..19: mol_type = other DNA
atgcttttactgactctgc

SEQ ID NO: 13 - DNA, 20 bp, synthetic construct
  source 1..20: mol_type = other DNA
ctacagtcctcagcagttcc

SEQ ID NO: 14 - DNA, 22 bp, synthetic construct
  source 1..22: mol_type = other DNA
gccatcattctagcattaccct

SEQ ID NO: 15 - DNA, 23 bp, synthetic construct
  source 1..23: mol_type = other DNA
atcagccccttgttcagcatgtg

SEQ ID NO: 16 - DNA, 19 bp, synthetic construct
  source 1..19: mol_type = other DNA
tccagtagcaaggaccagt

SEQ ID NO: 17 - DNA, 22 bp, synthetic construct
  source 1..22: mol_type = other DNA
caatactgttctgtctgggaga

SEQ ID NO: 18 - DNA, 24 bp, synthetic construct
  source 1..24: mol_type = other DNA
actgaccactgatgaccacgttcc

SEQ ID NO: 19-29 - skipped (11 entries)

SEQ ID NO: 30 - DNA, 20 bp, synthetic construct
  source 1..20: mol_type = other DNA
gattccatcaaaagaaatcg

SEQ ID NO: 31 - DNA, 20 bp, synthetic construct
  source 1..20: mol_type = other DNA
cgaactggattctgtacttt

SEQ ID NO: 32 - DNA, 20 bp, synthetic construct
  source 1..20: mol_type = other DNA
gctaactggtttgcccttgc

SEQ ID NO: 33 - DNA, 20 bp, synthetic construct
  source 1..20: mol_type = other DNA
ctctccattatttcttcacg

SEQ ID NO: 34 - DNA, 20 bp, synthetic construct
  source 1..20: mol_type = other DNA
cgggcggcggctgctgctgc

SEQ ID NO: 35 - DNA, 20 bp, synthetic construct
  source 1..20: mol_type = other DNA
cagccgcgggcggcggctgc

SEQ ID NO: 36 - DNA, 20 bp, synthetic construct
  source 1..20: mol_type = other DNA
cattggcagccgcgggcggc

SEQ ID NO: 37 - DNA, 20 bp, synthetic construct
  source 1..20: mol_type = other DNA
tgcggacattggcagccgcg

SEQ ID NO: 38 - DNA, 20 bp, synthetic construct
  source 1..20: mol_type = other DNA
cgggcttgcggacattggca

SEQ ID NO: 39 - DNA, 20 bp, synthetic construct
  source 1..20: mol_type = other DNA
tgccgccgggcttgcggaca

SEQ ID NO: 40 - DNA, 20 bp, synthetic construct
  source 1..20: mol_type = other DNA
ctagaaggccgctgccgccg

SEQ ID NO: 41 - DNA, 20 bp, synthetic construct
  source 1..20: mol_type = other DNA
ggcgcggcggcgggcgacgc

SEQ ID NO: 42 - DNA, 20 bp, synthetic construct
  source 1..20: mol_type = other DNA
ggcgaaggcgcggcggcggg

SEQ ID NO: 43 - DNA, 20 bp, synthetic construct
  source 1..20: mol_type = other DNA
gaggacggcgaaggcgcggc

SEQ ID NO: 44 - DNA, 20 bp, synthetic construct
  source 1..20: mol_type = other DNA
gaggacgaggacggcgaagg

SEQ ID NO: 45 - DNA, 20 bp, synthetic construct
  source 1..20: mol_type = other DNA
gagaccgaggacgaggacgg

SEQ ID NO: 46 - DNA, 20 bp, synthetic construct
  source 1..20: mol_type = other DNA
gacgaggagaccgaggacga

SEQ ID NO: 47 - DNA, 20 bp, synthetic construct
  source 1..20: mol_type = other DNA
gccgaggacgaggagaccga

SEQ ID NO: 48 - DNA, 20 bp, synthetic construct
  source 1..20: mol_type = other DNA
gccgtggccgaggacgagga

SEQ ID NO: 49 - DNA, 20 bp, synthetic construct
  source 1..20: mol_type = other DNA
gagggagccgtggccgagga

SEQ ID NO: 50 - DNA, 20 bp, synthetic construct
  source 1..20: mol_type = other DNA
accgaggagggagccgtggc

SEQ ID NO: 51 - DNA, 20 bp, synthetic construct
  source 1..20: mol_type = other DNA
gcgaccaccgaggagggagc

SEQ ID NO: 52 - DNA, 20 bp, synthetic construct
  source 1..20: mol_type = other DNA
gtcgccgcgaccaccgagga

SEQ ID NO: 53 - DNA, 20 bp, synthetic construct
  source 1..20: mol_type = other DNA
ccggaggtcgccgcgaccac

SEQ ID NO: 54 - DNA, 20 bp, synthetic construct
  source 1..20: mol_type = other DNA
ccgccgccggaggtcgccgc

SEQ ID NO: 55 - DNA, 20 bp, synthetic construct
  source 1..20: mol_type = other DNA
ggcctcccgccgccggaggt

SEQ ID NO: 56 - DNA, 20 bp, synthetic construct
  source 1..20: mol_type = other DNA
aggccgggcctcccgccgcc

SEQ ID NO: 57 - DNA, 20 bp, synthetic construct
  source 1..20: mol_type = other DNA
ctgcccaggccgggcctccc

SEQ ID NO: 58 - DNA, 20 bp, synthetic construct
  source 1..20: mol_type = other DNA
cgacctctgcccaggccggg

SEQ ID NO: 59 - DNA, 20 bp, synthetic construct
  source 1..20: mol_type = other DNA
ctgtttcgacctctgcccag

SEQ ID NO: 60 - DNA, 20 bp, synthetic construct
  source 1..20: mol_type = other DNA
ttgttactgtttcgacctct

SEQ ID NO: 61 - DNA, 20 bp, synthetic construct
  source 1..20: mol_type = other DNA
agtcctttgttactgtttcg

SEQ ID NO: 62 - DNA, 20 bp, synthetic construct
  source 1..20: mol_type = other DNA
tgaggcagtcctttgttact

SEQ ID NO: 63 - DNA, 20 bp, synthetic construct
  source 1..20: mol_type = other DNA
gtagactgaggcagtccttt

SEQ ID NO: 64 - DNA, 20 bp, synthetic construct
  source 1..20: mol_type = other DNA
agattccatcaaaagaaatc

SEQ ID NO: 65 - DNA, 20 bp, synthetic construct
  source 1..20: mol_type = other DNA
atagattccatcaaaagaaa

SEQ ID NO: 66 - DNA, 20 bp, synthetic construct
  source 1..20: mol_type = other DNA
gcatagattccatcaaaaga

SEQ ID NO: 67 - DNA, 20 bp, synthetic construct
  source 1..20: mol_type = other DNA
tgcatagattccatcaaaag

SEQ ID NO: 68 - DNA, 20 bp, synthetic construct
  source 1..20: mol_type = other DNA
ttgcatagattccatcaaaa

SEQ ID NO: 69 - DNA, 20 bp, synthetic construct
  source 1..20: mol_type = other DNA
atttgcatagattccatcaa

SEQ ID NO: 70 - DNA, 20 bp, synthetic construct
  source 1..20: mol_type = other DNA
atatttgcatagattccatc

SEQ ID NO: 71 - DNA, 20 bp, synthetic construct
  source 1..20: mol_type = other DNA
catatttgcatagattccat

SEQ ID NO: 72 - DNA, 20 bp, synthetic construct
  source 1..20: mol_type = other DNA
catcctcatatttgcataga

SEQ ID NO: 73 - DNA, 20 bp, synthetic construct
  source 1..20: mol_type = other DNA
atgaaccatcctcatatttg

SEQ ID NO: 74 - DNA, 20 bp, synthetic construct
  source 1..20: mol_type = other DNA
aagtatatgaaccatcctca

SEQ ID NO: 75 - DNA, 20 bp, synthetic construct
  source 1..20: mol_type = other DNA
tgatgtaagtatatgaacca

SEQ ID NO: 76 - DNA, 20 bp, synthetic construct
  source 1..20: mol_type = other DNA
aacaactgatgtaagtatat

SEQ ID NO: 77 - DNA, 20 bp, synthetic construct
  source 1..20: mol_type = other DNA
ttggagccaacaactgatgt

SEQ ID NO: 78 - DNA, 20 bp, synthetic construct
  source 1..20: mol_type = other DNA
ttcacatttggagccaacaa

SEQ ID NO: 79 - DNA, 20 bp, synthetic construct
  source 1..20: mol_type = other DNA
ttgtacttcacatttggagc

SEQ ID NO: 80 - DNA, 20 bp, synthetic construct
  source 1..20: mol_type = other DNA
tttcacttgtacttcacatt

SEQ ID NO: 81 - DNA, 20 bp, synthetic construct
  source 1..20: mol_type = other DNA
tccatttttcacttgtactt

SEQ ID NO: 82 - DNA, 20 bp, synthetic construct
  source 1..20: mol_type = other DNA
tatacctccatttttcactt

SEQ ID NO: 83 - DNA, 20 bp, synthetic construct
  source 1..20: mol_type = other DNA
ttcatatatacctccatttt

SEQ ID NO: 84 - DNA, 20 bp, synthetic construct
  source 1..20: mol_type = other DNA
aactccttcatatatacctc

SEQ ID NO: 85 - DNA, 20 bp, synthetic construct
  source 1..20: mol_type = other DNA
tttaaaaactccttcatata

SEQ ID NO: 86 - DNA, 20 bp, synthetic construct
  source 1..20: mol_type = other DNA
gtaagttttaaaaactcctt

SEQ ID NO: 87 - DNA, 20 bp, synthetic construct
  source 1..20: mol_type = other DNA
cggactgtaagttttaaaaa

SEQ ID NO: 88 - DNA, 20 bp, synthetic construct
  source 1..20: mol_type = other DNA
acacttcggactgtaagttt

SEQ ID NO: 89 - DNA, 20 bp, synthetic construct
  source 1..20: mol_type = other DNA
caaatcacacttcggactgt

SEQ ID NO: 90 - DNA, 20 bp, synthetic construct
  source 1..20: mol_type = other DNA
aagtaccaaatcacacttcg

SEQ ID NO: 91 - DNA, 20 bp, synthetic construct
  source 1..20: mol_type = other DNA
ggcatcaagtaccaaatcac

SEQ ID NO: 92 - DNA, 20 bp, synthetic construct
  source 1..20: mol_type = other DNA
atgtgcggcatcaagtacca

SEQ ID NO: 93 - DNA, 20 bp, synthetic construct
  source 1..20: mol_type = other DNA
tttctcatgtgcggcatcaa

SEQ ID NO: 94 - DNA, 20 bp, synthetic construct
  source 1..20: mol_type = other DNA
tgtacttttctcatgtgcgg

SEQ ID NO: 95 - DNA, 20 bp, synthetic construct
  source 1..20: mol_type = other DNA
ggattctgtacttttctcat

SEQ ID NO: 96 - DNA, 20 bp, synthetic construct
  source 1..20: mol_type = other DNA
cggccccgaactggattctg

SEQ ID NO: 97 - DNA, 20 bp, synthetic construct
  source 1..20: mol_type = other DNA
actctccattatttcttcac

SEQ ID NO: 98 - DNA, 20 bp, synthetic construct
  source 1..20: mol_type = other DNA
atactctccattatttcttc

SEQ ID NO: 99 - DNA, 20 bp, synthetic construct
  source 1..20: mol_type = other DNA
aaatactctccattatttct

SEQ ID NO: 100 - DNA, 20 bp, synthetic construct
  source 1..20: mol_type = other DNA
aaaatactctccattatttc

SEQ ID NO: 101 - DNA, 20 bp, synthetic construct
  source 1..20: mol_type = other DNA
ttgaacaaaatactctccat

SEQ ID NO: 102 - DNA, 20 bp, synthetic construct
  source 1..20: mol_type = other DNA
gaacatttgaacaaaatact

SEQ ID NO: 103 - DNA, 20 bp, synthetic construct
  source 1..20: mol_type = other DNA
aagtctgaacatttgaacaa

SEQ ID NO: 104 - DNA, 20 bp, synthetic construct
  source 1..20: mol_type = other DNA
acaacaaagtctgaacattt

SEQ ID NO: 105 - DNA, 20 bp, synthetic construct
  source 1..20: mol_type = other DNA
tgtaccacaacaaagtctga

SEQ ID NO: 106 - DNA, 20 bp, synthetic construct
  source 1..20: mol_type = other DNA
atatctttaaactgtaccac

SEQ ID NO: 107 - DNA, 20 bp, synthetic construct
  source 1..20: mol_type = other DNA
gagtccatatctttaaactg

SEQ ID NO: 108 - DNA, 20 bp, synthetic construct
  source 1..20: mol_type = other DNA
tgctaactggtttgcccttg

SEQ ID NO: 109 - DNA, 20 bp, synthetic construct
  source 1..20: mol_type = other DNA
tctgctaactggtttgccct

SEQ ID NO: 110 - DNA, 20 bp, synthetic construct
  source 1..20: mol_type = other DNA
cttctgctaactggtttgcc

SEQ ID NO: 111 - DNA, 20 bp, synthetic construct
  source 1..20: mol_type = other DNA
tgctgtgtatttttcttcct

SEQ ID NO: 112 - DNA, 20 bp, synthetic construct
  source 1..20: mol_type = other DNA
cccatacgcggtgaattctg

SEQ ID NO: 113 - DNA, 20 bp, synthetic construct
  source 1..20: mol_type = other DNA
taactggagtccatatcttt

SEQ ID NO: 114 - DNA, 20 bp, synthetic construct
  source 1..20: mol_type = other DNA
tttgcataactggagtccat

SEQ ID NO: 115 - DNA, 20 bp, synthetic construct
  source 1..20: mol_type = other DNA
tctctttttgcataactgga

SEQ ID NO: 116 - DNA, 20 bp, synthetic construct
  source 1..20: mol_type = other DNA
aaagcatctctttttgcata

SEQ ID NO: 117 - DNA, 20 bp, synthetic construct
  source 1..20: mol_type = other DNA
tcagtaaaagcatctctttt

SEQ ID NO: 118 - DNA, 20 bp, synthetic construct
  source 1..20: mol_type = other DNA
gcagagtcagtaaaagcatc

SEQ ID NO: 119 - DNA, 20 bp, synthetic construct
  source 1..20: mol_type = other DNA
ctgatagcagagtcagtaaa

SEQ ID NO: 120 - DNA, 20 bp, synthetic construct
  source 1..20: mol_type = other DNA
ttagcactgatagcagagtc

SEQ ID NO: 121 - DNA, 20 bp, synthetic construct
  source 1..20: mol_type = other DNA
ttcactttagcactgatagc

SEQ ID NO: 122 - DNA, 20 bp, synthetic construct
  source 1..20: mol_type = other DNA
tcgccattcactttagcact

SEQ ID NO: 123 - DNA, 20 bp, synthetic construct
  source 1..20: mol_type = other DNA
tccaggtccttctctttgtg

SEQ ID NO: 124 - DNA, 20 bp, synthetic construct
  source 1..20: mol_type = other DNA
cagggctccaggtccttctc

SEQ ID NO: 125 - DNA, 20 bp, synthetic construct
  source 1..20: mol_type = other DNA
gcatcccagggctccaggtc

SEQ ID NO: 126 - DNA, 20 bp, synthetic construct
  source 1..20: mol_type = other DNA
tcacctgcatcccagggctc

SEQ ID NO: 127 - DNA, 20 bp, synthetic construct
  source 1..20: mol_type = other DNA
gtgagttcacctgcatccca

SEQ ID NO: 128 - DNA, 20 bp, synthetic construct
  source 1..20: mol_type = other DNA
ttggctgtgagttcacctgc

SEQ ID NO: 129 - DNA, 20 bp, synthetic construct
  source 1..20: mol_type = other DNA
tcctcattggctgtgagttc

SEQ ID NO: 130 - DNA, 20 bp, synthetic construct
  source 1..20: mol_type = other DNA
tcaagttcctcattggctgt

SEQ ID NO: 131 - DNA, 20 bp, synthetic construct
  source 1..20: mol_type = other DNA
ttttccaaagcctcaagttc

SEQ ID NO: 132 - DNA, 20 bp, synthetic construct
  source 1..20: mol_type = other DNA
gatcccatccattagatacg

SEQ ID NO: 133 - DNA, 20 bp, synthetic construct
  source 1..20: mol_type = other DNA
gaaacatatcattgggatcc

SEQ ID NO: 134 - DNA, 20 bp, synthetic construct
  source 1..20: mol_type = other DNA
tatatcgaaacatatcattg

SEQ ID NO: 135 - DNA, 20 bp, synthetic construct
  source 1..20: mol_type = other DNA
cttcattatatcgaaacata

SEQ ID NO: 136 - DNA, 20 bp, synthetic construct
  source 1..20: mol_type = other DNA
aattttcttcattatatcga

SEQ ID NO: 137 - DNA, 20 bp, synthetic construct
  source 1..20: mol_type = other DNA
caccataattttcttcatta

SEQ ID NO: 138 - DNA, 20 bp, synthetic construct
  source 1..20: mol_type = other DNA
acactacaccataattttct

SEQ ID NO: 139 - DNA, 20 bp, synthetic construct
  source 1..20: mol_type = other DNA
tgtatacgaagataaactgc

SEQ ID NO: 140 - DNA, 20 bp, synthetic construct
  source 1..20: mol_type = other DNA
atctctttctaagggcactg

SEQ ID NO: 141 - DNA, 20 bp, synthetic construct
  source 1..20: mol_type = other DNA
ttcttctgagttatctcttt

SEQ ID NO: 142 - DNA, 20 bp, synthetic construct
  source 1..20: mol_type = other DNA
taaaaattcttctgagttat

SEQ ID NO: 143 - DNA, 20 bp, synthetic construct
  source 1..20: mol_type = other DNA
ccgttttaaaaattcttctg

SEQ ID NO: 144 - DNA, 20 bp, synthetic construct
  source 1..20: mol_type = other DNA
tgcttcccgttttaaaaatt

SEQ ID NO: 145 - DNA, 20 bp, synthetic construct
  source 1..20: mol_type = other DNA
tgcccttgcttcccgtttta

SEQ ID NO: 146 - DNA, 20 bp, synthetic construct
  source 1..20: mol_type = other DNA
ctggtttgcccttgcttccc

SEQ ID NO: 147 - DNA, 20 bp, synthetic construct
  source 1..20: mol_type = other DNA
aactggtttgcccttgcttc

SEQ ID NO: 148 - DNA, 20 bp, synthetic construct
  source 1..20: mol_type = other DNA
ctaactggtttgcccttgct

SEQ ID NO: 149 - DNA, 20 bp, synthetic construct
  source 1..20: mol_type = other DNA
ttcttctgctaactggtttg

SEQ ID NO: 150 - DNA, 20 bp, synthetic construct
  source 1..20: mol_type = other DNA
ctcaatttcttctgctaact

SEQ ID NO: 151 - DNA, 20 bp, synthetic construct
  source 1..20: mol_type = other DNA
acttgactcaatttcttctg

SEQ ID NO: 152 - DNA, 20 bp, synthetic construct
  source 1..20: mol_type = other DNA
ctgggcacttgactcaattt

SEQ ID NO: 153 - DNA, 20 bp, synthetic construct
  source 1..20: mol_type = other DNA
tttgtactgggcacttgact

SEQ ID NO: 154 - DNA, 20 bp, synthetic construct
  source 1..20: mol_type = other DNA
tcgagctttgtactgggcac

SEQ ID NO: 155 - DNA, 20 bp, synthetic construct
  source 1..20: mol_type = other DNA
ggccactcgagctttgtact

SEQ ID NO: 156 - DNA, 20 bp, synthetic construct
  source 1..20: mol_type = other DNA
ttccagggccactcgagctt

SEQ ID NO: 157 - DNA, 20 bp, synthetic construct
  source 1..20: mol_type = other DNA
atcattttccagggccactc

SEQ ID NO: 158 - DNA, 20 bp, synthetic construct
  source 1..20: mol_type = other DNA
cctatcatcattttccaggg

SEQ ID NO: 159 - DNA, 20 bp, synthetic construct
  source 1..20: mol_type = other DNA
ctcactcctatcatcatttt

SEQ ID NO: 160 - DNA, 20 bp, synthetic construct
  source 1..20: mol_type = other DNA
ttcttcctcactcctatcat

SEQ ID NO: 161 - DNA, 20 bp, synthetic construct
  source 1..20: mol_type = other DNA
gtatttttcttcctcactcc

SEQ ID NO: 162 - DNA, 20 bp, synthetic construct
  source 1..20: mol_type = other DNA
ctgaactgctgtgtattttt

SEQ ID NO: 163 - DNA, 20 bp, synthetic construct
  source 1..20: mol_type = other DNA
atttctctgaactgctgtgt

SEQ ID NO: 164 - DNA, 20 bp, synthetic construct
  source 1..20: mol_type = other DNA
actggaatttctctgaactg

SEQ ID NO: 165 - DNA, 20 bp, synthetic construct
  source 1..20: mol_type = other DNA
tttatgctgtgcccctcacg

SEQ ID NO: 166 - DNA, 20 bp, synthetic construct
  source 1..20: mol_type = other DNA
ctagtgtttatgctgtgccc

SEQ ID NO: 167 - DNA, 20 bp, synthetic construct
  source 1..20: mol_type = other DNA
ttttccctagtgtttatgct

SEQ ID NO: 168 - DNA, 20 bp, synthetic construct
  source 1..20: mol_type = other DNA
tatttattttccctagtgtt

SEQ ID NO: 169 - DNA, 20 bp, synthetic construct
  source 1..20: mol_type = other DNA
ccaggaggaatatatttatt

SEQ ID NO: 170 - DNA, 20 bp, synthetic construct
  source 1..20: mol_type = other DNA
ctttgtccaggaggaatata

SEQ ID NO: 171 - DNA, 20 bp, synthetic construct
  source 1..20: mol_type = other DNA
ctatttctttgtccaggagg

SEQ ID NO: 172 - DNA, 20 bp, synthetic construct
  source 1..20: mol_type = other DNA
acttctctatttctttgtcc

SEQ ID NO: 173 - DNA, 20 bp, synthetic construct
  source 1..20: mol_type = other DNA
gatatgacttctctatttct

SEQ ID NO: 174 - DNA, 20 bp, synthetic construct
  source 1..20: mol_type = other DNA
ccccaggatatgacttctct

SEQ ID NO: 175 - DNA, 20 bp, synthetic construct
  source 1..20: mol_type = other DNA
ccacttccccaggatatgac

SEQ ID NO: 176 - DNA, 20 bp, synthetic construct
  source 1..20: mol_type = other DNA
tgtctcccacttccccagga

SEQ ID NO: 177 - DNA, 20 bp, synthetic construct
  source 1..20: mol_type = other DNA
gaattctgtctcccacttcc

SEQ ID NO: 178 - DNA, 20 bp, synthetic construct
  source 1..20: mol_type = other DNA
cgcggtgaattctgtctccc

SEQ ID NO: 179 - DNA, 20 bp, synthetic construct
  source 1..20: mol_type = other DNA
acgcggtgaattctgtctcc

SEQ ID NO: 180 - DNA, 20 bp, synthetic construct
  source 1..20: mol_type = other DNA
atacgcggtgaattctgtct

SEQ ID NO: 181 - DNA, 20 bp, synthetic construct
  source 1..20: mol_type = other DNA
ccatacgcggtgaattctgt

SEQ ID NO: 182 - DNA, 20 bp, synthetic construct
  source 1..20: mol_type = other DNA
gcccatacgcggtgaattct

SEQ ID NO: 183 - DNA, 20 bp, synthetic construct
  source 1..20: mol_type = other DNA
tggcccatacgcggtgaatt

SEQ ID NO: 184 - DNA, 20 bp, synthetic construct
  source 1..20: mol_type = other DNA
gctggcccatacgcggtgaa

SEQ ID NO: 185 - DNA, 20 bp, synthetic construct
  source 1..20: mol_type = other DNA
ttaactactctttggtctga

SEQ ID NO: 186 - DNA, 20 bp, synthetic construct
  source 1..20: mol_type = other DNA
ctggagggcggccgtgtagg

SEQ ID NO: 187 - DNA, 20 bp, synthetic construct
  source 1..20: mol_type = other DNA
ggagaaccatgagcagaggg

SEQ ID NO: 188 - DNA, 20 bp, synthetic construct
  source 1..20: mol_type = other DNA
ggagctggagaaccatgagc

SEQ ID NO: 189 - DNA, 20 bp, synthetic construct
  source 1..20: mol_type = other DNA
gagacaggagctggagaacc

SEQ ID NO: 190 - DNA, 20 bp, synthetic construct
  source 1..20: mol_type = other DNA
gtgggatacaaattctaggc

SEQ ID NO: 191 - DNA, 20 bp, synthetic construct
  source 1..20: mol_type = other DNA
ggctggcccatacgcggtga

SEQ ID NO: 192 - DNA, 20 bp, synthetic construct
  source 1..20: mol_type = other DNA
gatccaggctggcccatacg

SEQ ID NO: 193 - DNA, 20 bp, synthetic construct
  source 1..20: mol_type = other DNA
gagcccgatccaggctggcc

SEQ ID NO: 194 - DNA, 20 bp, synthetic construct
  source 1..20: mol_type = other DNA
ggcatggagcccgatccagg

SEQ ID NO: 195 - DNA, 20 bp, synthetic construct
  source 1..20: mol_type = other DNA
cttgatggcatggagcccga

SEQ ID NO: 196 - DNA, 20 bp, synthetic construct
  source 1..20: mol_type = other DNA
gtggatcttgatggcatgga

SEQ ID NO: 197 - DNA, 20 bp, synthetic construct
  source 1..20: mol_type = other DNA
tgagaagtggatcttgatgg

SEQ ID NO: 198 - DNA, 20 bp, synthetic construct
  source 1..20: mol_type = other DNA
gaagtgtgagaagtggatct

SEQ ID NO: 199 - DNA, 20 bp, synthetic construct
  source 1..20: mol_type = other DNA
aaatctgaagtgtgagaagt

SEQ ID NO: 200 - DNA, 20 bp, synthetic construct
  source 1..20: mol_type = other DNA
gggttgaaatctgaagtgtg

SEQ ID NO: 201 - DNA, 20 bp, synthetic construct
  source 1..20: mol_type = other DNA
gaaccagaattcgggttgaa

SEQ ID NO: 202 - DNA, 20 bp, synthetic construct
  source 1..20: mol_type = other DNA
tggtctgaaccagaattcgg

SEQ ID NO: 203 - DNA, 20 bp, synthetic construct
  source 1..20: mol_type = other DNA
actctttggtctgaaccaga

SEQ ID NO: 204 - DNA, 20 bp, synthetic construct
  source 1..20: mol_type = other DNA
cctccattaactactctttg

SEQ ID NO: 205 - DNA, 20 bp, synthetic construct
  source 1..20: mol_type = other DNA
ggaacacctccattaactac

SEQ ID NO: 206 - DNA, 20 bp, synthetic construct
  source 1..20: mol_type = other DNA
ggcgatggccagggaacacc

SEQ ID NO: 207 - DNA, 20 bp, synthetic construct
  source 1..20: mol_type = other DNA
tgggcaaggcgatggccagg

SEQ ID NO: 208 - DNA, 20 bp, synthetic construct
  source 1..20: mol_type = other DNA
aggagatgggcaaggcgatg

SEQ ID NO: 209 - DNA, 20 bp, synthetic construct
  source 1..20: mol_type = other DNA
agaggaaggagatgggcaag

SEQ ID NO: 210 - DNA, 20 bp, synthetic construct
  source 1..20: mol_type = other DNA
tgggcgagaggaaggagatg

SEQ ID NO: 211 - DNA, 20 bp, synthetic construct
  source 1..20: mol_type = other DNA
agaaggtgggcgagaggaag

SEQ ID NO: 212 - DNA, 20 bp, synthetic construct
  source 1..20: mol_type = other DNA
gtagcgagaaggtgggcgag

SEQ ID NO: 213 - DNA, 20 bp, synthetic construct
  source 1..20: mol_type = other DNA
tgactggtagcgagaaggtg

SEQ ID NO: 214 - DNA, 20 bp, synthetic construct
  source 1..20: mol_type = other DNA
gggacctgactggtagcgag

SEQ ID NO: 215 - DNA, 20 bp, synthetic construct
  source 1..20: mol_type = other DNA
agagttgggacctgactggt

SEQ ID NO: 216 - DNA, 20 bp, synthetic construct
  source 1..20: mol_type = other DNA
tggaagagagttgggacctg

SEQ ID NO: 217 - DNA, 20 bp, synthetic construct
  source 1..20: mol_type = other DNA
ccgaggtggaagagagttgg

SEQ ID NO: 218 - DNA, 20 bp, synthetic construct
  source 1..20: mol_type = other DNA
ggctgcccgaggtggaagag

SEQ ID NO: 219 - DNA, 20 bp, synthetic construct
  source 1..20: mol_type = other DNA
ggtctggatggccgcgaggg

SEQ ID NO: 220 - DNA, 20 bp, synthetic construct
  source 1..20: mol_type = other DNA
tggagaaccatgagcagagg

SEQ ID NO: 221 - DNA, 20 bp, synthetic construct
  source 1..20: mol_type = other DNA
gctggagaaccatgagcaga

SEQ ID NO: 222 - DNA, 20 bp, synthetic construct
  source 1..20: mol_type = other DNA
gagctggagaaccatgagca

SEQ ID NO: 223 - DNA, 20 bp, synthetic construct
  source 1..20: mol_type = other DNA
aggagctggagaaccatgag

SEQ ID NO: 224 - DNA, 20 bp, synthetic construct
  source 1..20: mol_type = other DNA
acaggagctggagaaccatg

SEQ ID NO: 225 - DNA, 20 bp, synthetic construct
  source 1..20: mol_type = other DNA
agacaggagctggagaacca

SEQ ID NO: 226 - DNA, 20 bp, synthetic construct
  source 1..20: mol_type = other DNA
atagtagagacaggagctgg

SEQ ID NO: 227 - DNA, 20 bp, synthetic construct
  source 1..20: mol_type = other DNA
ttaggcatagtagagacagg

SEQ ID NO: 228 - DNA, 20 bp, synthetic construct
  source 1..20: mol_type = other DNA
ggcccttctgaagacatgcg

SEQ ID NO: 229 - DNA, 20 bp, synthetic construct
  source 1..20: mol_type = other DNA
cttggaggcccttctgaaga

SEQ ID NO: 230 - DNA, 20 bp, synthetic construct
  source 1..20: mol_type = other DNA
gacatccttggaggcccttc

SEQ ID NO: 231 - DNA, 20 bp, synthetic construct
  source 1..20: mol_type = other DNA
ggatgtcgctgggcctttgg

SEQ ID NO: 232 - DNA, 20 bp, synthetic construct
  source 1..20: mol_type = other DNA
tttcgaggatgtcgctgggc

SEQ ID NO: 233 - DNA, 20 bp, synthetic construct
  source 1..20: mol_type = other DNA
ctgtgatttcgaggatgtcg

SEQ ID NO: 234 - DNA, 20 bp, synthetic construct
  source 1..20: mol_type = other DNA
gaaactctgtgatttcgagg

SEQ ID NO: 235 - DNA, 20 bp, synthetic construct
  source 1..20: mol_type = other DNA
ccagcagaaactctgtgatt

SEQ ID NO: 236 - DNA, 20 bp, synthetic construct
  source 1..20: mol_type = other DNA
cccctcccagcagaaactct

SEQ ID NO: 237 - DNA, 20 bp, synthetic construct
  source 1..20: mol_type = other DNA
atggaacccctcccagcaga

SEQ ID NO: 238 - DNA, 20 bp, synthetic construct
  source 1..20: mol_type = other DNA
ctggatatggaacccctccc

SEQ ID NO: 239 - DNA, 20 bp, synthetic construct
  source 1..20: mol_type = other DNA
aggccactggatatggaacc

SEQ ID NO: 240 - DNA, 20 bp, synthetic construct
  source 1..20: mol_type = other DNA
aattctaggccactggatat

SEQ ID NO: 241 - DNA, 20 bp, synthetic construct
  source 1..20: mol_type = other DNA
atacaaattctaggccactg

SEQ ID NO: 242 - DNA, 20 bp, synthetic construct
  source 1..20: mol_type = other DNA
ggatacaaattctaggccac

SEQ ID NO: 243 - DNA, 20 bp, synthetic construct
  source 1..20: mol_type = other DNA
tgggatacaaattctaggcc

SEQ ID NO: 244 - DNA, 20 bp, synthetic construct
  source 1..20: mol_type = other DNA
tgtgggatacaaattctagg

SEQ ID NO: 245 - DNA, 20 bp, synthetic construct
  source 1..20: mol_type = other DNA
gttgtgggatacaaattcta

SEQ ID NO: 246 - DNA, 20 bp, synthetic construct
  source 1..20: mol_type = other DNA
gtagctgcttcactgggtgg

SEQ ID NO: 247 - DNA, 20 bp, synthetic construct
  source 1..20: mol_type = other DNA
ggaggagtagctgcttcact

SEQ ID NO: 248 - DNA, 20 bp, synthetic construct
  source 1..20: mol_type = other DNA
gctactggaggagtagctgc

SEQ ID NO: 249 - DNA, 20 bp, synthetic construct
  source 1..20: mol_type = other DNA
gtccttgctactggaggagt

SEQ ID NO: 250 - DNA, 20 bp, synthetic construct
  source 1..20: mol_type = other DNA
ggactggtccttgctactgg

SEQ ID NO: 251 - DNA, 20 bp, synthetic construct
  source 1..20: mol_type = other DNA
cccgagggactggtccttgc

SEQ ID NO: 252 - DNA, 20 bp, synthetic construct
  source 1..20: mol_type = other DNA
gttccccccgagggactggt

SEQ ID NO: 253 - DNA, 20 bp, synthetic construct
  source 1..20: mol_type = other DNA
actgaccactgatgaccacg

SEQ ID NO: 254 - DNA, 20 bp, synthetic construct
  source 1..20: mol_type = other DNA
aaccccactgaccactgatg

SEQ ID NO: 255 - DNA, 20 bp, synthetic construct
  source 1..20: mol_type = other DNA
tcttggaaccccactgacca

SEQ ID NO: 256 - DNA, 20 bp, synthetic construct
  source 1..20: mol_type = other DNA
ggataatcttggaaccccac

SEQ ID NO: 257 - DNA, 20 bp, synthetic construct
  source 1..20: mol_type = other DNA
ctgggtctatgagttttagg

SEQ ID NO: 258 - DNA, 20 bp, synthetic construct
  source 1..20: mol_type = other DNA
ggagacctgggtctatgagt

SEQ ID NO: 259 - DNA, 20 bp, synthetic construct
  source 1..20: mol_type = other DNA
gttctgtctgggagacctgg

SEQ ID NO: 260 - DNA, 20 bp, synthetic construct
  source 1..20: mol_type = other DNA
aatactgttctgtctgggag

SEQ ID NO: 261 - DNA, 20 bp, synthetic construct
  source 1..20: mol_type = other DNA
atttccaatactgttctgtc

SEQ ID NO: 262 - DNA, 20 bp, synthetic construct
  source 1..20: mol_type = other DNA
gcaagaactggcccactggg

SEQ ID NO: 263 - DNA, 20 bp, synthetic construct
  source 1..20: mol_type = other DNA
ggagaagcaagaactggccc

SEQ ID NO: 264 - DNA, 20 bp, synthetic construct
  source 1..20: mol_type = other DNA
tggaataataccagcttggg

SEQ ID NO: 265 - DNA, 20 bp, synthetic construct
  source 1..20: mol_type = other DNA
ttcagttggaataataccag

SEQ ID NO: 266 - DNA, 20 bp, synthetic construct
  source 1..20: mol_type = other DNA
aacagcttcagttggaataa

SEQ ID NO: 267 - DNA, 20 bp, synthetic construct
  source 1..20: mol_type = other DNA
catggcaacagcttcagttg

SEQ ID NO: 268 - DNA, 20 bp, synthetic construct
  source 1..20: mol_type = other DNA
aataggcatggcaacagctt

SEQ ID NO: 269 - DNA, 20 bp, synthetic construct
  source 1..20: mol_type = other DNA
agctggaataggcatggcaa

SEQ ID NO: 270 - DNA, 20 bp, synthetic construct
  source 1..20: mol_type = other DNA
agatgcagctggaataggca

SEQ ID NO: 271 - DNA, 20 bp, synthetic construct
  source 1..20: mol_type = other DNA
cgtaggagatgcagctggaa

SEQ ID NO: 272 - DNA, 20 bp, synthetic construct
  source 1..20: mol_type = other DNA
cgatgcaggactagcaggcg

SEQ ID NO: 273 - DNA, 20 bp, synthetic construct
  source 1..20: mol_type = other DNA
tctgttcgatgcaggactag

SEQ ID NO: 274 - DNA, 20 bp, synthetic construct
  source 1..20: mol_type = other DNA
aacagctctgttcgatgcag

SEQ ID NO: 275 - DNA, 20 bp, synthetic construct
  source 1..20: mol_type = other DNA
tggaatctttagcctcacta

SEQ ID NO: 276 - DNA, 20 bp, synthetic construct
  source 1..20: mol_type = other DNA
gaagcctggaatctttagcc

SEQ ID NO: 277 - DNA, 20 bp, synthetic construct
  source 1..20: mol_type = other DNA
gatcttgaagcctggaatct

SEQ ID NO: 278 - DNA, 20 bp, synthetic construct
  source 1..20: mol_type = other DNA
gcctctgatcttgaagcctg

SEQ ID NO: 279 - DNA, 20 bp, synthetic construct
  source 1..20: mol_type = other DNA
agttctgcctctgatcttga

SEQ ID NO: 280 - DNA, 20 bp, synthetic construct
  source 1..20: mol_type = other DNA
caggagagttctgcctctga

SEQ ID NO: 281 - DNA, 20 bp, synthetic construct
  source 1..20: mol_type = other DNA
tccctgcaggagagttctgc

SEQ ID NO: 282 - DNA, 20 bp, synthetic construct
  source 1..20: mol_type = other DNA
ctttattccctgcaggagag

SEQ ID NO: 283 - DNA, 20 bp, synthetic construct
  source 1..20: mol_type = other DNA
tattttctttattccctgca

SEQ ID NO: 284 - DNA, 20 bp, synthetic construct
  source 1..20: mol_type = other DNA
gtttaatattttctttattc

SEQ ID NO: 285 - DNA, 20 bp, synthetic construct
  source 1..20: mol_type = other DNA
cattgggtttaatattttct

SEQ ID NO: 286 - DNA, 20 bp, synthetic construct
  source 1..20: mol_type = other DNA
atgtttcattgggtttaata

SEQ ID NO: 287 - DNA, 20 bp, synthetic construct
  source 1..20: mol_type = other DNA
taggtgatgtttcattgggt

SEQ ID NO: 288 - DNA, 20 bp, synthetic construct
  source 1..20: mol_type = other DNA
agaagctaggtgatgtttca

SEQ ID NO: 289 - DNA, 20 bp, synthetic construct
  source 1..20: mol_type = other DNA
cttttgagaagctaggtgat

SEQ ID NO: 290 - DNA, 20 bp, synthetic construct
  source 1..20: mol_type = other DNA
tttcagcttttgagaagcta

SEQ ID NO: 291 - DNA, 20 bp, synthetic construct
  source 1..20: mol_type = other DNA
ctttgttttcagcttttgag

SEQ ID NO: 292 - DNA, 20 bp, synthetic construct
  source 1..20: mol_type = other DNA
atatacctttgttttcagct

SEQ ID NO: 293 - DNA, 20 bp, synthetic construct
  source 1..20: mol_type = other DNA
ctggtgatatacctttgttt

SEQ ID NO: 294 - DNA, 20 bp, synthetic construct
  source 1..20: mol_type = other DNA
aaacaactggtgatatacct

SEQ ID NO: 295 - DNA, 20 bp, synthetic construct
  source 1..20: mol_type = other DNA
gttcagaaacaactggtgat

SEQ ID NO: 296 - DNA, 20 bp, synthetic construct
  source 1..20: mol_type = other DNA
ttctatgttcagaaacaact

SEQ ID NO: 297 - DNA, 20 bp, synthetic construct
  source 1..20: mol_type = other DNA
tctgttttctatgttcagaa

SEQ ID NO: 298 - DNA, 20 bp, synthetic construct
  source 1..20: mol_type = other DNA
catcaatctgttttctatgt

SEQ ID NO: 299 - DNA, 20 bp, synthetic construct
  source 1..20: mol_type = other DNA
ttaaatcatcaatctgtttt

SEQ ID NO: 300 - DNA, 20 bp, synthetic construct
  source 1..20: mol_type = other DNA
atttctttaaatcatcaatc

SEQ ID NO: 301 - DNA, 20 bp, synthetic construct
  source 1..20: mol_type = other DNA
tcttaaatttctttaaatca

SEQ ID NO: 302 - DNA, 20 bp, synthetic construct
  source 1..20: mol_type = other DNA
aatcattcttaaatttcttt

SEQ ID NO: 303 - DNA, 20 bp, synthetic construct
  source 1..20: mol_type = other DNA
acctaaaatcattcttaaat

SEQ ID NO: 304 - DNA, 20 bp, synthetic construct
  source 1..20: mol_type = other DNA
gctgtaacctaaaatcattc

SEQ ID NO: 305 - DNA, 20 bp, synthetic construct
  source 1..20: mol_type = other DNA
aacttggctgtaacctaaaa

SEQ ID NO: 306 - DNA, 20 bp, synthetic construct
  source 1..20: mol_type = other DNA
aagtagaacttggctgtaac

SEQ ID NO: 307 - DNA, 20 bp, synthetic construct
  source 1..20: mol_type = other DNA
attcagaagtagaacttggc

SEQ ID NO: 308 - DNA, 20 bp, synthetic construct
  source 1..20: mol_type = other DNA
ccatagattcagaagtagaa

SEQ ID NO: 309 - DNA, 20 bp, synthetic construct
  source 1..20: mol_type = other DNA
gttgatccatagattcagaa

SEQ ID NO: 310 - DNA, 20 bp, synthetic construct
  source 1..20: mol_type = other DNA
ttagtagttgatccatagat

SEQ ID NO: 311 - DNA, 20 bp, synthetic construct
  source 1..20: mol_type = other DNA
ttttgtttagtagttgatcc

SEQ ID NO: 312 - DNA, 20 bp, synthetic construct
  source 1..20: mol_type = other DNA
ctctatttttgtttagtagt

SEQ ID NO: 313 - DNA, 20 bp, synthetic construct
  source 1..20: mol_type = other DNA
ctccctctctatttttgttt

SEQ ID NO: 314 - DNA, 20 bp, synthetic construct
  source 1..20: mol_type = other DNA
atttttctccctctctattt

SEQ ID NO: 315 - DNA, 20 bp, synthetic construct
  source 1..20: mol_type = other DNA
ctcttgatttttctccctct

SEQ ID NO: 316 - DNA, 20 bp, synthetic construct
  source 1..20: mol_type = other DNA
tcaaatctcttgatttttct

SEQ ID NO: 317 - DNA, 20 bp, synthetic construct
  source 1..20: mol_type = other DNA
ctttgatcaaatctcttgat

SEQ ID NO: 318 - DNA, 20 bp, synthetic construct
  source 1..20: mol_type = other DNA
ttttgtctttgatcaaatct

SEQ ID NO: 319 - DNA, 20 bp, synthetic construct
  source 1..20: mol_type = other DNA
gttcaattttgtctttgatc

SEQ ID NO: 320 - DNA, 20 bp, synthetic construct
  source 1..20: mol_type = other DNA
cacttggttcaattttgtct

SEQ ID NO: 321 - DNA, 20 bp, synthetic construct
  source 1..20: mol_type = other DNA
ccttagcacttggttcaatt

SEQ ID NO: 322 - DNA, 20 bp, synthetic construct
  source 1..20: mol_type = other DNA
aagaatccttagcacttggt

SEQ ID NO: 323 - DNA, 20 bp, synthetic construct
  source 1..20: mol_type = other DNA
caatgaaagaatccttagca

SEQ ID NO: 324 - DNA, 20 bp, synthetic construct
  source 1..20: mol_type = other DNA
tattttcaatgaaagaatcc

SEQ ID NO: 325 - DNA, 20 bp, synthetic construct
  source 1..20: mol_type = other DNA
tgctgctattttcaatgaaa

SEQ ID NO: 326 - DNA, 20 bp, synthetic construct
  source 1..20: mol_type = other DNA
agttgctgctgctattttca

SEQ ID NO: 327 - DNA, 20 bp, synthetic construct
  source 1..20: mol_type = other DNA
acagttgctgctgctatttt

SEQ ID NO: 328 - DNA, 20 bp, synthetic construct
  source 1..20: mol_type = other DNA
gtacagttgctgctgctatt

SEQ ID NO: 329 - DNA, 20 bp, synthetic construct
  source 1..20: mol_type = other DNA
tggtacagttgctgctgcta

SEQ ID NO: 330 - DNA, 20 bp, synthetic construct
  source 1..20: mol_type = other DNA
ctggtacagttgctgctgct

SEQ ID NO: 331 - DNA, 20 bp, synthetic construct
  source 1..20: mol_type = other DNA
actggtacagttgctgctgc

SEQ ID NO: 332 - DNA, 20 bp, synthetic construct
  source 1..20: mol_type = other DNA
ccactggtacagttgctgct

SEQ ID NO: 333 - DNA, 20 bp, synthetic construct
  source 1..20: mol_type = other DNA
tgccactggtacagttgctg

SEQ ID NO: 334 - DNA, 20 bp, synthetic construct
  source 1..20: mol_type = other DNA
tgctgctgccactggtacag

SEQ ID NO: 335 - DNA, 20 bp, synthetic construct
  source 1..20: mol_type = other DNA
tcggcttgctgctgccactg

SEQ ID NO: 336 - DNA, 20 bp, synthetic construct
  source 1..20: mol_type = other DNA
ggctattcggcttgctgctg

SEQ ID NO: 337 - DNA, 20 bp, synthetic construct
  source 1..20: mol_type = other DNA
tgttactaagtattgaaggg

SEQ ID NO: 338 - DNA, 20 bp, synthetic construct
  source 1..20: mol_type = other DNA
gctccgtgttactaagtatt

SEQ ID NO: 339 - DNA, 20 bp, synthetic construct
  source 1..20: mol_type = other DNA
tcttgtgctccgtgttacta

SEQ ID NO: 340 - DNA, 20 bp, synthetic construct
  source 1..20: mol_type = other DNA
gtcccctcttgtgctccgtg

SEQ ID NO: 341 - DNA, 20 bp, synthetic construct
  source 1..20: mol_type = other DNA
cctcaggtcccctcttgtgc

SEQ ID NO: 342 - DNA, 20 bp, synthetic construct
  source 1..20: mol_type = other DNA
aagtgacctcaggtcccctc

SEQ ID NO: 343 - DNA, 20 bp, synthetic construct
  source 1..20: mol_type = other DNA
cttgggaagtgacctcaggt

SEQ ID NO: 344 - DNA, 20 bp, synthetic construct
  source 1..20: mol_type = other DNA
gaaccccttgggaagtgacc

SEQ ID NO: 345 - DNA, 20 bp, synthetic construct
  source 1..20: mol_type = other DNA
aagtctgaaccccttgggaa

SEQ ID NO: 346 - DNA, 20 bp, synthetic construct
  source 1..20: mol_type = other DNA
ggctggaagtctgaacccct

SEQ ID NO: 347 - DNA, 20 bp, synthetic construct
  source 1..20: mol_type = other DNA
atgctgggctggaagtctga

SEQ ID NO: 348 - DNA, 20 bp, synthetic construct
  source 1..20: mol_type = other DNA
gtttacatgctgggctggaa

SEQ ID NO: 349 - DNA, 20 bp, synthetic construct
  source 1..20: mol_type = other DNA
tctcttgtttacatgctggg

SEQ ID NO: 350 - DNA, 20 bp, synthetic construct
  source 1..20: mol_type = other DNA
cgtctttctcttgtttacat

SEQ ID NO: 351 - DNA, 20 bp, synthetic construct
  source 1..20: mol_type = other DNA
ctttcttctcttccttatcg

SEQ ID NO: 352 - DNA, 20 bp, synthetic construct
  source 1..20: mol_type = other DNA
tcctaacttgctcagctgcg

SEQ ID NO: 353 - DNA, 20 bp, synthetic construct
  source 1..20: mol_type = other DNA
tgttgatttcctaacttgct

SEQ ID NO: 354 - DNA, 20 bp, synthetic construct
  source 1..20: mol_type = other DNA
attcaatgttgatttcctaa

SEQ ID NO: 355 - DNA, 20 bp, synthetic construct
  source 1..20: mol_type = other DNA
tgcattgggattcaatgttg

SEQ ID NO: 356 - DNA, 20 bp, synthetic construct
  source 1..20: mol_type = other DNA
gtgggttgaactcctttgca

SEQ ID NO: 357 - DNA, 20 bp, synthetic construct
  source 1..20: mol_type = other DNA
tttggctgagagaaggaacg

SEQ ID NO: 358 - DNA, 20 bp, synthetic construct
  source 1..20: mol_type = other DNA
gaaggctttggctgagagaa

SEQ ID NO: 359 - DNA, 20 bp, synthetic construct
  source 1..20: mol_type = other DNA
gtagtagaaggctttggctg

SEQ ID NO: 360 - DNA, 20 bp, synthetic construct
  source 1..20: mol_type = other DNA
gaggccgaggtgaagttggg

SEQ ID NO: 361 - DNA, 20 bp, synthetic construct
  source 1..20: mol_type = other DNA
gtgcttgaggccgaggtgaa

SEQ ID NO: 362 - DNA, 20 bp, synthetic construct
  source 1..20: mol_type = other DNA
taggttgtgcttgaggccga

SEQ ID NO: 363 - DNA, 20 bp, synthetic construct
  source 1..20: mol_type = other DNA
atgggctaggttgtgcttga

SEQ ID NO: 364 - DNA, 20 bp, synthetic construct
  source 1..20: mol_type = other DNA
ccatagatgggctaggttgt

SEQ ID NO: 365 - DNA, 20 bp, synthetic construct
  source 1..20: mol_type = other DNA
gacccaccatagatgggcta

SEQ ID NO: 366 - DNA, 20 bp, synthetic construct
  source 1..20: mol_type = other DNA
gttgatgacccaccatagat

SEQ ID NO: 367 - DNA, 20 bp, synthetic construct
  source 1..20: mol_type = other DNA
ttggctgttgatgacccacc

SEQ ID NO: 368 - DNA, 20 bp, synthetic construct
  source 1..20: mol_type = other DNA
ctggagttggctgttgatga

SEQ ID NO: 369 - DNA, 20 bp, synthetic construct
  source 1..20: mol_type = other DNA
tataaactggagttggctgt

SEQ ID NO: 370 - DNA, 20 bp, synthetic construct
  source 1..20: mol_type = other DNA
gctgagtataaactggagtt

SEQ ID NO: 371 - DNA, 20 bp, synthetic construct
  source 1..20: mol_type = other DNA
aaacaggctgagtataaact

SEQ ID NO: 372 - DNA, 20 bp, synthetic construct
  source 1..20: mol_type = other DNA
caaaacaaacaggctgagta

SEQ ID NO: 373 - DNA, 20 bp, synthetic construct
  source 1..20: mol_type = other DNA
ttggtgcaaaacaaacaggc

SEQ ID NO: 374 - DNA, 20 bp, synthetic construct
  source 1..20: mol_type = other DNA
tcatatttggtgcaaaacaa

SEQ ID NO: 375 - DNA, 20 bp, synthetic construct
  source 1..20: mol_type = other DNA
gatacatcatatttggtgca

SEQ ID NO: 376 - DNA, 20 bp, synthetic construct
  source 1..20: mol_type = other DNA
ggactggatacatcatattt

SEQ ID NO: 377 - DNA, 20 bp, synthetic construct
  source 1..20: mol_type = other DNA
tcactgggactggatacatc

SEQ ID NO: 378 - DNA, 20 bp, synthetic construct
  source 1..20: mol_type = other DNA
tgcacgcctgggctcactgg

SEQ ID NO: 379 - DNA, 20 bp, synthetic construct
  source 1..20: mol_type = other DNA
aaaggttgcacgcctgggct

SEQ ID NO: 380 - DNA, 20 bp, synthetic construct
  source 1..20: mol_type = other DNA
gggtataaaggttgcacgcc

SEQ ID NO: 381 - DNA, 20 bp, synthetic construct
  source 1..20: mol_type = other DNA
ggtattgggtataaaggttg

SEQ ID NO: 382 - DNA, 20 bp, synthetic construct
  source 1..20: mol_type = other DNA
gtcataggtattgggtataa

SEQ ID NO: 383 - DNA, 20 bp, synthetic construct
  source 1..20: mol_type = other DNA
ttgattcactggcatgggcg

SEQ ID NO: 384 - DNA, 20 bp, synthetic construct
  source 1..20: mol_type = other DNA
cttggcttgattcactggca

SEQ ID NO: 385 - DNA, 20 bp, synthetic construct
  source 1..20: mol_type = other DNA
atatgtcttggcttgattca

SEQ ID NO: 386 - DNA, 20 bp, synthetic construct
  source 1..20: mol_type = other DNA
tgctctatatgtcttggctt

SEQ ID NO: 387 - DNA, 20 bp, synthetic construct
  source 1..20: mol_type = other DNA
tggtactgctctatatgtct

SEQ ID NO: 388 - DNA, 20 bp, synthetic construct
  source 1..20: mol_type = other DNA
catatttggtactgctctat

SEQ ID NO: 389 - DNA, 20 bp, synthetic construct
  source 1..20: mol_type = other DNA
ctggtcttgccgctgttggg

SEQ ID NO: 390 - DNA, 20 bp, synthetic construct
  source 1..20: mol_type = other DNA
atgatgctggtcttgccgct

SEQ ID NO: 391 - DNA, 20 bp, synthetic construct
  source 1..20: mol_type = other DNA
actctgatgatgctggtctt

SEQ ID NO: 392 - DNA, 20 bp, synthetic construct
  source 1..20: mol_type = other DNA
catggcactctgatgatgct

SEQ ID NO: 393 - DNA, 20 bp, synthetic construct
  source 1..20: mol_type = other DNA
gtgcatcatggcactctgat

SEQ ID NO: 394 - DNA, 20 bp, synthetic construct
  source 1..20: mol_type = other DNA
cgctgggtgcatcatggcac

SEQ ID NO: 395 - DNA, 20 bp, synthetic construct
  source 1..20: mol_type = other DNA
ggtgggcccgctgctgacgc

SEQ ID NO: 396 - DNA, 20 bp, synthetic construct
  source 1..20: mol_type = other DNA
gcaatcggtgggcccgctgc

SEQ ID NO: 397 - DNA, 20 bp, synthetic construct
  source 1..20: mol_type = other DNA
gtggctgcaatcggtgggcc

SEQ ID NO: 398 - DNA, 20 bp, synthetic construct
  source 1..20: mol_type = other DNA
actgtaggcaacatattgcg

SEQ ID NO: 399 - DNA, 20 bp, synthetic construct
  source 1..20: mol_type = other DNA
ctgaggactgtaggcaacat

SEQ ID NO: 400 - DNA, 20 bp, synthetic construct
  source 1..20: mol_type = other DNA
tggcacatgctgaacaaggg

SEQ ID NO: 401 - DNA, 20 bp, synthetic construct
  source 1..20: mol_type = other DNA
ataatgtggcacatgctgaa

SEQ ID NO: 402 - DNA, 20 bp, synthetic construct
  source 1..20: mol_type = other DNA
agactgataatgtggcacat

SEQ ID NO: 403 - DNA, 20 bp, synthetic construct
  source 1..20: mol_type = other DNA
atgctgagactgataatgtg

SEQ ID NO: 404 - DNA, 20 bp, synthetic construct
  source 1..20: mol_type = other DNA
atgaggatgctgagactgat

SEQ ID NO: 405 - DNA, 20 bp, synthetic construct
  source 1..20: mol_type = other DNA
atagacatgaggatgctgag

SEQ ID NO: 406 - DNA, 20 bp, synthetic construct
  source 1..20: mol_type = other DNA
aggactatagacatgaggat

SEQ ID NO: 407 - DNA, 20 bp, synthetic construct
  source 1..20: mol_type = other DNA
tattacaggactatagacat

SEQ ID NO: 408 - DNA, 20 bp, synthetic construct
  source 1..20: mol_type = other DNA
accctgtattacaggactat

SEQ ID NO: 409 - DNA, 20 bp, synthetic construct
  source 1..20: mol_type = other DNA
agcattaccctgtattacag

SEQ ID NO: 410 - DNA, 20 bp, synthetic construct
  source 1..20: mol_type = other DNA
cattctagcattaccctgta

SEQ ID NO: 411 - DNA, 20 bp, synthetic construct
  source 1..20: mol_type = other DNA
tgccatcattctagcattac

SEQ ID NO: 412 - DNA, 20 bp, synthetic construct
  source 1..20: mol_type = other DNA
tggtggtgccatcattctag

SEQ ID NO: 413 - DNA, 20 bp, synthetic construct
  source 1..20: mol_type = other DNA
atactaaaccaggctgggcg

SEQ ID NO: 414 - DNA, 20 bp, synthetic construct
  source 1..20: mol_type = other DNA
aagaagatactaaaccaggc

SEQ ID NO: 415 - DNA, 20 bp, synthetic construct
  source 1..20: mol_type = other DNA
ttgctgaagaagatactaaa

SEQ ID NO: 416 - DNA, 20 bp, synthetic construct
  source 1..20: mol_type = other DNA
tggtaatttgggacatgcat

SEQ ID NO: 417 - DNA, 20 bp, synthetic construct
  source 1..20: mol_type = other DNA
gcttgtctccttgttgtatg

SEQ ID NO: 418 - DNA, 20 bp, synthetic construct
  source 1..20: mol_type = other DNA
gtacatgagcctgaggtacg

SEQ ID NO: 419 - DNA, 20 bp, synthetic construct
  source 1..20: mol_type = other DNA
tcattagcatcattggcgca

SEQ ID NO: 420 - DNA, 20 bp, synthetic construct
  source 1..20: mol_type = other DNA
actgagttgctgaagaagat

SEQ ID NO: 421 - DNA, 20 bp, synthetic construct
  source 1..20: mol_type = other DNA
ccccgtactgagttgctgaa

SEQ ID NO: 422 - DNA, 20 bp, synthetic construct
  source 1..20: mol_type = other DNA
catgagccccgtactgagtt

SEQ ID NO: 423 - DNA, 20 bp, synthetic construct
  source 1..20: mol_type = other DNA
tctgctcatgagccccgtac

SEQ ID NO: 424 - DNA, 20 bp, synthetic construct
  source 1..20: mol_type = other DNA
acatgcatacatcgcatgcg

SEQ ID NO: 425 - DNA, 20 bp, synthetic construct
  source 1..20: mol_type = other DNA
tttgggacatgcatacatcg

SEQ ID NO: 426 - DNA, 20 bp, synthetic construct
  source 1..20: mol_type = other DNA
gttgtatggtaatttgggac

SEQ ID NO: 427 - DNA, 20 bp, synthetic construct
  source 1..20: mol_type = other DNA
ctccttgttgtatggtaatt

SEQ ID NO: 428 - DNA, 20 bp, synthetic construct
  source 1..20: mol_type = other DNA
agaagggcttgtctccttgt

SEQ ID NO: 429 - DNA, 20 bp, synthetic construct
  source 1..20: mol_type = other DNA
gtagaaagaagggcttgtct

SEQ ID NO: 430 - DNA, 20 bp, synthetic construct
  source 1..20: mol_type = other DNA
ggcaaagtagaaagaagggc

SEQ ID NO: 431 - DNA, 20 bp, synthetic construct
  source 1..20: mol_type = other DNA
ggaaatggcaaagtagaaag

SEQ ID NO: 432 - DNA, 20 bp, synthetic construct
  source 1..20: mol_type = other DNA
gcccgtggaaatggcaaagt

SEQ ID NO: 433 - DNA, 20 bp, synthetic construct
  source 1..20: mol_type = other DNA
aagggagcccgtggaaatgg

SEQ ID NO: 434 - DNA, 20 bp, synthetic construct
  source 1..20: mol_type = other DNA
ctgagcaagggagcccgtgg

SEQ ID NO: 435 - DNA, 20 bp, synthetic construct
  source 1..20: mol_type = other DNA
atactgctgagcaagggagc

SEQ ID NO: 436 - DNA, 20 bp, synthetic construct
  source 1..20: mol_type = other DNA
gtgcgcatactgctgagcaa

SEQ ID NO: 437 - DNA, 20 bp, synthetic construct
  source 1..20: mol_type = other DNA
gttagggtgcgcatactgct

SEQ ID NO: 438 - DNA, 20 bp, synthetic construct
  source 1..20: mol_type = other DNA
gtggagtatgtgggtgcagg

SEQ ID NO: 439 - DNA, 20 bp, synthetic construct
  source 1..20: mol_type = other DNA
tgagggtgtggagtatgtgg

SEQ ID NO: 440 - DNA, 20 bp, synthetic construct
  source 1..20: mol_type = other DNA
gaaggctgagggtgtggagt

SEQ ID NO: 441 - DNA, 20 bp, synthetic construct
  source 1..20: mol_type = other DNA
gtagctgaaggctgagggtg

SEQ ID NO: 442 - DNA, 20 bp, synthetic construct
  source 1..20: mol_type = other DNA
ctttgctgctgtccagtggg

SEQ ID NO: 443 - DNA, 20 bp, synthetic construct
  source 1..20: mol_type = other DNA
tgttggctttgctgctgtcc

SEQ ID NO: 444 - DNA, 20 bp, synthetic construct
  source 1..20: mol_type = other DNA
ccaccatgttggctttgctg

SEQ ID NO: 445 - DNA, 20 bp, synthetic construct
  source 1..20: mol_type = other DNA
tgacttccaccatgttggct

SEQ ID NO: 446 - DNA, 20 bp, synthetic construct
  source 1..20: mol_type = other DNA
gcaggatgacttccaccatg

SEQ ID NO: 447 - DNA, 20 bp, synthetic construct
  source 1..20: mol_type = other DNA
ctgggtgcaggatgacttcc

SEQ ID NO: 448 - DNA, 20 bp, synthetic construct
  source 1..20: mol_type = other DNA
aacaggactgggtgcaggat

SEQ ID NO: 449 - DNA, 20 bp, synthetic construct
  source 1..20: mol_type = other DNA
gatggtgctgaacaggactg

SEQ ID NO: 450 - DNA, 20 bp, synthetic construct
  source 1..20: mol_type = other DNA
ggtgctgatggtgctgaaca

SEQ ID NO: 451 - DNA, 20 bp, synthetic construct
  source 1..20: mol_type = other DNA
cggcctggtgctgatggtgc

SEQ ID NO: 452 - DNA, 20 bp, synthetic construct
  source 1..20: mol_type = other DNA
cctgggcggcctggtgctga

SEQ ID NO: 453 - DNA, 20 bp, synthetic construct
  source 1..20: mol_type = other DNA
ggagagcctgggcggcctgg

SEQ ID NO: 454 - DNA, 20 bp, synthetic construct
  source 1..20: mol_type = other DNA
ccagatggagagcctgggcg

SEQ ID NO: 455 - DNA, 20 bp, synthetic construct
  source 1..20: mol_type = other DNA
gactggccagatggagagcc

SEQ ID NO: 456 - DNA, 20 bp, synthetic construct
  source 1..20: mol_type = other DNA
gctgtggactggccagatgg

SEQ ID NO: 457 - DNA, 20 bp, synthetic construct
  source 1..20: mol_type = other DNA
actgctgctgtggactggcc

SEQ ID NO: 458 - DNA, 20 bp, synthetic construct
  source 1..20: mol_type = other DNA
tggctgactgctgctgtgga

SEQ ID NO: 459 - DNA, 20 bp, synthetic construct
  source 1..20: mol_type = other DNA
ggtaaatggctgactgctgc

SEQ ID NO: 460 - DNA, 20 bp, synthetic construct
  source 1..20: mol_type = other DNA
gagttggcgcaagccccgcg

SEQ ID NO: 461 - DNA, 20 bp, synthetic construct
  source 1..20: mol_type = other DNA
agggtggagttggcgcaagc

SEQ ID NO: 462 - DNA, 20 bp, synthetic construct
  source 1..20: mol_type = other DNA
tcatggagggtggagttggc

SEQ ID NO: 463 - DNA, 20 bp, synthetic construct
  source 1..20: mol_type = other DNA
caggtgtcatggagggtgga

SEQ ID NO: 464 - DNA, 20 bp, synthetic construct
  source 1..20: mol_type = other DNA
tggaggcaggtgtcatggag

SEQ ID NO: 465 - DNA, 20 bp, synthetic construct
  source 1..20: mol_type = other DNA
actattctgtggcgactgcg

SEQ ID NO: 466 - DNA, 20 bp, synthetic construct
  source 1..20: mol_type = other DNA
tgggaaactattctgtggcg

SEQ ID NO: 467 - DNA, 20 bp, synthetic construct
  source 1..20: mol_type = other DNA
tgctgctgggaaactattct

SEQ ID NO: 468 - DNA, 20 bp, synthetic construct
  source 1..20: mol_type = other DNA
ctgttgtgctgctgggaaac

SEQ ID NO: 469 - DNA, 20 bp, synthetic construct
  source 1..20: mol_type = other DNA
gacagtctgttgtgctgctg

SEQ ID NO: 470 - DNA, 20 bp, synthetic construct
  source 1..20: mol_type = other DNA
cgtaaagacagtctgttgtg

SEQ ID NO: 471 - DNA, 20 bp, synthetic construct
  source 1..20: mol_type = other DNA
tggtatacgccggctgaacg

SEQ ID NO: 472 - DNA, 20 bp, synthetic construct
  source 1..20: mol_type = other DNA
gtgggttggtatacgccggc

SEQ ID NO: 473 - DNA, 20 bp, synthetic construct
  source 1..20: mol_type = other DNA
ctgactgtacatgagcctga

SEQ ID NO: 474 - DNA, 20 bp, synthetic construct
  source 1..20: mol_type = other DNA
ccattcctgactgtacatga

SEQ ID NO: 475 - DNA, 20 bp, synthetic construct
  source 1..20: mol_type = other DNA
aaggaaccattcctgactgt

SEQ ID NO: 476 - DNA, 20 bp, synthetic construct
  source 1..20: mol_type = other DNA
gatgagaaggaaccattcct

SEQ ID NO: 477 - DNA, 20 bp, synthetic construct
  source 1..20: mol_type = other DNA
cagttggatgagaaggaacc

SEQ ID NO: 478 - DNA, 20 bp, synthetic construct
  source 1..20: mol_type = other DNA
catgggcagttggatgagaa

SEQ ID NO: 479 - DNA, 20 bp, synthetic construct
  source 1..20: mol_type = other DNA
ttggcgcatgggcagttgga

SEQ ID NO: 480 - DNA, 20 bp, synthetic construct
  source 1..20: mol_type = other DNA
gcatcattggcgcatgggca

SEQ ID NO: 481 - DNA, 20 bp, synthetic construct
  source 1..20: mol_type = other DNA
accgccgggtggctgtgtcg

SEQ ID NO: 482 - DNA, 20 bp, synthetic construct
  source 1..20: mol_type = other DNA
tttgagcgagggcggcctgg

SEQ ID NO: 483 - DNA, 20 bp, synthetic construct
  source 1..20: mol_type = other DNA
gtgcactttgagcgagggcg

SEQ ID NO: 484 - DNA, 20 bp, synthetic construct
  source 1..20: mol_type = other DNA
gaatgggctgtagtgcactt

SEQ ID NO: 485 - DNA, 20 bp, synthetic construct
  source 1..20: mol_type = other DNA
agactggaatgggctgtagt

SEQ ID NO: 486 - DNA, 20 bp, synthetic construct
  source 1..20: mol_type = other DNA
ttgtcgagactggaatgggc

SEQ ID NO: 487 - DNA, 20 bp, synthetic construct
  source 1..20: mol_type = other DNA
gcgctgttgtcgagactgga

SEQ ID NO: 488 - DNA, 20 bp, synthetic construct
  source 1..20: mol_type = other DNA
ggaaatgcgctgttgtcgag

SEQ ID NO: 489 - DNA, 20 bp, synthetic construct
  source 1..20: mol_type = other DNA
ggcttgtactgaagggtgcg

SEQ ID NO: 490 - DNA, 20 bp, synthetic construct
  source 1..20: mol_type = other DNA
gtggtgggcttgtactgaag

SEQ ID NO: 491 - DNA, 20 bp, synthetic construct
  source 1..20: mol_type = other DNA
ctgttggtggtgggcttgta

SEQ ID NO: 492 - DNA, 20 bp, synthetic construct
  source 1..20: mol_type = other DNA
caactgctgttggtggtggg

SEQ ID NO: 493 - DNA, 20 bp, synthetic construct
  source 1..20: mol_type = other DNA
gcgctgggttgctttctcgg

SEQ ID NO: 494 - DNA, 20 bp, synthetic construct
  source 1..20: mol_type = other DNA
ccggccgctggagcgagcgc

SEQ ID NO: 495 - DNA, 20 bp, synthetic construct
  source 1..20: mol_type = other DNA
agaaggaggacgacgaaggg

SEQ ID NO: 496 - DNA, 20 bp, synthetic construct
  source 1..20: mol_type = other DNA
aagcctcaagttcctcattg

SEQ ID NO: 497 - DNA, 20 bp, synthetic construct
  source 1..20: mol_type = other DNA
gctgtgtatttttcttcctc

SEQ ID NO: 498 - DNA, 20 bp, synthetic construct
  source 1..20: mol_type = other DNA
ctctgttcgatgcaggacta

SEQ ID NO: 499 - DNA, 20 bp, synthetic construct
  source 1..20: mol_type = other DNA
agaatccttagcacttggtt

SEQ ID NO: 500 - DNA, 20 bp, synthetic construct
  source 1..20: mol_type = other DNA
ttggcttgattcactggcat

SEQ ID NO: 501 - DNA, 20 bp, synthetic construct
  source 1..20: mol_type = other DNA
aatttggcctttcggttcct

SEQ ID NO: 502 - DNA, 20 bp, synthetic construct
  source 1..20: mol_type = other DNA
tgcctctactcggtccaagt

SEQ ID NO: 503 - DNA, 20 bp, synthetic construct
  source 1..20: mol_type = other DNA
tcttgttacttcttttgcta

SEQ ID NO: 504 - DNA, 20 bp, synthetic construct
  source 1..20: mol_type = other DNA
cttaacttaaaagttgaacc

SEQ ID NO: 505 - DNA, 20 bp, synthetic construct
  source 1..20: mol_type = other DNA
tctagcccacaccttgccag

SEQ ID NO: 506 - DNA, 20 bp, synthetic construct
  source 1..20: mol_type = other DNA
cgaacagcaatgcggatcgg

SEQ ID NO: 507 - DNA, 20 bp, synthetic construct
  source 1..20: mol_type = other DNA
gaatttccagactttcaagc

SEQ ID NO: 508 - DNA, 20 bp, synthetic construct
  source 1..20: mol_type = other DNA
taacaaaggatgatgccatt

SEQ ID NO: 509 - DNA, 20 bp, synthetic construct
  source 1..20: mol_type = other DNA
ttgggcaagtcccctaatct

SEQ ID NO: 510 - DNA, 20 bp, synthetic construct
  source 1..20: mol_type = other DNA
accagcatgttaggaggcct

SEQ ID NO: 511 - DNA, 20 bp, synthetic construct
  source 1..20: mol_type = other DNA
tacttctttgggagatataa

SEQ ID NO: 512 - DNA, 20 bp, synthetic construct
  source 1..20: mol_type = other DNA
cagggtttccccatgttagg

SEQ ID NO: 513 - DNA, 20 bp, synthetic construct
  source 1..20: mol_type = other DNA
aaggagccaagattgcccca

SEQ ID NO: 514 - DNA, 20 bp, synthetic construct
  source 1..20: mol_type = other DNA
actgagactgtagatgagcc

SEQ ID NO: 515 - DNA, 20 bp, synthetic construct
  source 1..20: mol_type = other DNA
aagcaatggaacagttatta

SEQ ID NO: 516 - DNA, 20 bp, synthetic construct
  source 1..20: mol_type = other DNA
cagtcccctcccagtgctac

SEQ ID NO: 517 - DNA, 20 bp, synthetic construct
  source 1..20: mol_type = other DNA
gttcaaattccggctccatc

SEQ ID NO: 518 - DNA, 20 bp, synthetic construct
  source 1..20: mol_type = other DNA
tgtggtaaaaaagcaagaga

SEQ ID NO: 519 - DNA, 20 bp, synthetic construct
  source 1..20: mol_type = other DNA
aaatcaagcagagccaggtg

SEQ ID NO: 520 - DNA, 20 bp, synthetic construct
  source 1..20: mol_type = other DNA
tcttggacagagggagtaaa

SEQ ID NO: 521 - DNA, 20 bp, synthetic construct
  source 1..20: mol_type = other DNA
aaagctccacggaaaacaat

SEQ ID NO: 522 - DNA, 20 bp, synthetic construct
  source 1..20: mol_type = other DNA
tacatctttgactaataaaa

SEQ ID NO: 523 - DNA, 20 bp, synthetic construct
  source 1..20: mol_type = other DNA
attatagaatataatacaac

SEQ ID NO: 524 - DNA, 20 bp, synthetic construct
  source 1..20: mol_type = other DNA
aaaagcacattaattcaaaa

SEQ ID NO: 525 - DNA, 20 bp, synthetic construct
  source 1..20: mol_type = other DNA
tgtaaattgtcatactgtat

SEQ ID NO: 526 - DNA, 20 bp, synthetic construct
  source 1..20: mol_type = other DNA
ctacaatttacaacagaatt

SEQ ID NO: 527 - DNA, 20 bp, synthetic construct
  source 1..20: mol_type = other DNA
gattatagacatgtgccatc

SEQ ID NO: 528 - DNA, 20 bp, synthetic construct
  source 1..20: mol_type = other DNA
ttctgtaaagagacagtcaa

SEQ ID NO: 529 - DNA, 20 bp, synthetic construct
  source 1..20: mol_type = other DNA
aaactgtgaacaccatgaaa

SEQ ID NO: 530 - DNA, 20 bp, synthetic construct
  source 1..20: mol_type = other DNA
gttttgtttaatcacagttt

SEQ ID NO: 531 - DNA, 20 bp, synthetic construct
  source 1..20: mol_type = other DNA
cattttctccattaggcttc

SEQ ID NO: 532 - DNA, 20 bp, synthetic construct
  source 1..20: mol_type = other DNA
aaagaaagaagtactaatac

SEQ ID NO: 533 - DNA, 20 bp, synthetic construct
  source 1..20: mol_type = other DNA
atatactagacaccatggtt

SEQ ID NO: 534 - DNA, 20 bp, synthetic construct
  source 1..20: mol_type = other DNA
ctgttggcatagtaacatac

SEQ ID NO: 535 - DNA, 20 bp, synthetic construct
  source 1..20: mol_type = other DNA
taaccatttcttctcaacta

SEQ ID NO: 536 - DNA, 20 bp, synthetic construct
  source 1..20: mol_type = other DNA
gttgtgttaagagggcatta

SEQ ID NO: 537 - DNA, 20 bp, synthetic construct
  source 1..20: mol_type = other DNA
ttttgtttttaactttccat

SEQ ID NO: 538 - DNA, 20 bp, synthetic construct
  source 1..20: mol_type = other DNA
gatatgttacaaattctctt

SEQ ID NO: 539 - DNA, 20 bp, synthetic construct
  source 1..20: mol_type = other DNA
ctaatgtttcaactcctttt

SEQ ID NO: 540 - DNA, 20 bp, synthetic construct
  source 1..20: mol_type = other DNA
aaaggaagaggaaatataat

SEQ ID NO: 541 - DNA, 20 bp, synthetic construct
  source 1..20: mol_type = other DNA
gtcccttcccttagattctg

SEQ ID NO: 542 - DNA, 20 bp, synthetic construct
  source 1..20: mol_type = other DNA
ctggttccttacaattatct

SEQ ID NO: 543 - DNA, 20 bp, synthetic construct
  source 1..20: mol_type = other DNA
tttgatatgtggcaatgatg

SEQ ID NO: 544 - DNA, 20 bp, synthetic construct
  source 1..20: mol_type = other DNA
aacaaagcactaaggactga

SEQ ID NO: 545 - DNA, 20 bp, synthetic construct
  source 1..20: mol_type = other DNA
accaataattttatttatgt

SEQ ID NO: 546 - DNA, 20 bp, synthetic construct
  source 1..20: mol_type = other DNA
ttgtatgtgttaactattgt

SEQ ID NO: 547 - DNA, 20 bp, synthetic construct
  source 1..20: mol_type = other DNA
cagaacaggagaaaacattt

SEQ ID NO: 548 - DNA, 20 bp, synthetic construct
  source 1..20: mol_type = other DNA
gttagacaagatttaacata

SEQ ID NO: 549 - DNA, 20 bp, synthetic construct
  source 1..20: mol_type = other DNA
ggtatttatgtgggcacact

SEQ ID NO: 550 - DNA, 20 bp, synthetic construct
  source 1..20: mol_type = other DNA
aaatgaacaaaacgggagga

SEQ ID NO: 551 - DNA, 20 bp, synthetic construct
  source 1..20: mol_type = other DNA
aacaatattccatgcaaatg

SEQ ID NO: 552 - DNA, 20 bp, synthetic construct
  source 1..20: mol_type = other DNA
actgaaagtaaagacccagt

SEQ ID NO: 553 - DNA, 20 bp, synthetic construct
  source 1..20: mol_type = other DNA
gtgataccctgtctcattta

SEQ ID NO: 554 - DNA, 20 bp, synthetic construct
  source 1..20: mol_type = other DNA
caactcctaacctcaagtaa

SEQ ID NO: 555 - DNA, 20 bp, synthetic construct
  source 1..20: mol_type = other DNA
ctaggcatgagaaggtttcc

SEQ ID NO: 556 - DNA, 20 bp, synthetic construct
  source 1..20: mol_type = other DNA
gttagaatgtgactctccca

SEQ ID NO: 557 - DNA, 20 bp, synthetic construct
  source 1..20: mol_type = other DNA
ctgggacggctttgaatgtg

SEQ ID NO: 558 - DNA, 20 bp, synthetic construct
  source 1..20: mol_type = other DNA
caaatttttaaattgttttg

SEQ ID NO: 559 - DNA, 20 bp, synthetic construct
  source 1..20: mol_type = other DNA
tgaggctgacacaggcagac

SEQ ID NO: 560 - DNA, 20 bp, synthetic construct
  source 1..20: mol_type = other DNA
cttgatcaagtccctgtaac

SEQ ID NO: 561 - DNA, 20 bp, synthetic construct
  source 1..20: mol_type = other DNA
atgtagttacatgtaaccat

SEQ ID NO: 562 - DNA, 20 bp, synthetic construct
  source 1..20: mol_type = other DNA
gcagatttaatgaagaacat

SEQ ID NO: 563 - DNA, 20 bp, synthetic construct
  source 1..20: mol_type = other DNA
tccattttaaaaactgaatt

SEQ ID NO: 564 - DNA, 20 bp, synthetic construct
  source 1..20: mol_type = other DNA
aataaaaggcaacttgacca

SEQ ID NO: 565 - DNA, 20 bp, synthetic construct
  source 1..20: mol_type = other DNA
actgcacccggcctaaaaat

SEQ ID NO: 566 - DNA, 20 bp, synthetic construct
  source 1..20: mol_type = other DNA
atctcccatctttgctttat

SEQ ID NO: 567 - DNA, 20 bp, synthetic construct
  source 1..20: mol_type = other DNA
cattccagagtcaaagatat

SEQ ID NO: 568 - DNA, 20 bp, synthetic construct
  source 1..20: mol_type = other DNA
cacagtcaagtatgtgaatt

SEQ ID NO: 569 - DNA, 20 bp, synthetic construct
  source 1..20: mol_type = other DNA
gcggcgcgctgggttgcttt

SEQ ID NO: 570 - DNA, 20 bp, synthetic construct
  source 1..20: mol_type = other DNA
ccgcgccggccgctggagcg

SEQ ID NO: 571 - DNA, 20 bp, synthetic construct
  source 1..20: mol_type = other DNA
cgggttggcgcggccggagg

SEQ ID NO: 572 - DNA, 20 bp, synthetic construct
  source 1..20: mol_type = other DNA
cgtcattttccaaagcctca

SEQ ID NO: 573 - DNA, 20 bp, synthetic construct
  source 1..20: mol_type = other DNA
cgttcactggaatttctctg

SEQ ID NO: 574 - DNA, 20 bp, synthetic construct
  source 1..20: mol_type = other DNA
agctctgttcgatgcaggac

SEQ ID NO: 575 - DNA, 20 bp, synthetic construct
  source 1..20: mol_type = other DNA
aaagaatccttagcacttgg

SEQ ID NO: 576 - DNA, 20 bp, synthetic construct
  source 1..20: mol_type = other DNA
tcttggcttgattcactggc

SEQ ID NO: 577 - DNA, 20 bp, synthetic construct
  source 1..20: mol_type = other DNA
gagggaatttggcctttcgg

SEQ ID NO: 578 - DNA, 20 bp, synthetic construct
  source 1..20: mol_type = other DNA
ctaaatgcctctactcggtc

SEQ ID NO: 579 - DNA, 20 bp, synthetic construct
  source 1..20: mol_type = other DNA
aatagcagcaagaatcactc

SEQ ID NO: 580 - DNA, 20 bp, synthetic construct
  source 1..20: mol_type = other DNA
tttcccttaacttaaaagtt

SEQ ID NO: 581 - DNA, 20 bp, synthetic construct
  source 1..20: mol_type = other DNA
gcatctctagcccacacctt

SEQ ID NO: 582 - DNA, 20 bp, synthetic construct
  source 1..20: mol_type = other DNA
gggagagagccccgacagac

SEQ ID NO: 583 - DNA, 20 bp, synthetic construct
  source 1..20: mol_type = other DNA
ggcctcgaacagcaatgcgg

SEQ ID NO: 584 - DNA, 20 bp, synthetic construct
  source 1..20: mol_type = other DNA
ttcttaaagcagatgtgaat

SEQ ID NO: 585 - DNA, 20 bp, synthetic construct
  source 1..20: mol_type = other DNA
tcaatgtgcacataaaagaa

SEQ ID NO: 586 - DNA, 20 bp, synthetic construct
  source 1..20: mol_type = other DNA
atcctacaaatattgctttg

SEQ ID NO: 587 - DNA, 20 bp, synthetic construct
  source 1..20: mol_type = other DNA
ttacaaagacttcattatag

SEQ ID NO: 588 - DNA, 20 bp, synthetic construct
  source 1..20: mol_type = other DNA
tttcaataatgcaatgcatc

SEQ ID NO: 589 - DNA, 20 bp, synthetic construct
  source 1..20: mol_type = other DNA
gtcgcccagcaggctggagt

SEQ ID NO: 590 - DNA, 20 bp, synthetic construct
  source 1..20: mol_type = other DNA
gaaaaaataaaaaggagaga

SEQ ID NO: 591 - DNA, 20 bp, synthetic construct
  source 1..20: mol_type = other DNA
gagtcactgagactgtagat

SEQ ID NO: 592 - DNA, 20 bp, synthetic construct
  source 1..20: mol_type = other DNA
ttagaagcaatggaacagtt

SEQ ID NO: 593 - DNA, 20 bp, synthetic construct
  source 1..20: mol_type = other DNA
ggcagtcccctcccagtgct

SEQ ID NO: 594 - DNA, 20 bp, synthetic construct
  source 1..20: mol_type = other DNA
caagaactaatatcagcatt

SEQ ID NO: 595 - DNA, 20 bp, synthetic construct
  source 1..20: mol_type = other DNA
ttcagtagagcaagtaactg

SEQ ID NO: 596 - DNA, 20 bp, synthetic construct
  source 1..20: mol_type = other DNA
aacagcaatacaacaattaa

SEQ ID NO: 597 - DNA, 20 bp, synthetic construct
  source 1..20: mol_type = other DNA
gtaacaatcctggattggtt

SEQ ID NO: 598 - DNA, 20 bp, synthetic construct
  source 1..20: mol_type = other DNA
caaagaagcgcaaatttgat

SEQ ID NO: 599 - DNA, 20 bp, synthetic construct
  source 1..20: mol_type = other DNA
tcccctttaaataagtcaca

SEQ ID NO: 600 - DNA, 20 bp, synthetic construct
  source 1..20: mol_type = other DNA
agaaaagatgcagtacacaa

SEQ ID NO: 601 - DNA, 20 bp, synthetic construct
  source 1..20: mol_type = other DNA
gcagaaaaaaagcacattaa

SEQ ID NO: 602 - DNA, 20 bp, synthetic construct
  source 1..20: mol_type = other DNA
cgaattacataatacttaag

SEQ ID NO: 603 - DNA, 20 bp, synthetic construct
  source 1..20: mol_type = other DNA
aaattgtactgaactacaat

SEQ ID NO: 604 - DNA, 20 bp, synthetic construct
  source 1..20: mol_type = other DNA
gaaaataaagcacaaattct

SEQ ID NO: 605 - DNA, 20 bp, synthetic construct
  source 1..20: mol_type = other DNA
aatcaaagcatgcaattagt

SEQ ID NO: 606 - DNA, 20 bp, synthetic construct
  source 1..20: mol_type = other DNA
gctttgctatctctaactct

SEQ ID NO: 607 - DNA, 20 bp, synthetic construct
  source 1..20: mol_type = other DNA
aattaaacaaattcacagat

SEQ ID NO: 608 - DNA, 20 bp, synthetic construct
  source 1..20: mol_type = other DNA
tactgtttatgggtgaacat

SEQ ID NO: 609 - DNA, 20 bp, synthetic construct
  source 1..20: mol_type = other DNA
aaatgtagtgtacctgtgta

SEQ ID NO: 610 - DNA, 20 bp, synthetic construct
  source 1..20: mol_type = other DNA
atcaccacactccaacctca

SEQ ID NO: 611 - DNA, 20 bp, synthetic construct
  source 1..20: mol_type = other DNA
tgcagttatcaaaaactaaa

SEQ ID NO: 612 - DNA, 20 bp, synthetic construct
  source 1..20: mol_type = other DNA
caaaatcctcagctaaccat

SEQ ID NO: 613 - DNA, 20 bp, synthetic construct
  source 1..20: mol_type = other DNA
agaatttaggttgtgttaag

SEQ ID NO: 614 - DNA, 20 bp, synthetic construct
  source 1..20: mol_type = other DNA
cagaccggagtgcagtgaca

SEQ ID NO: 615 - DNA, 20 bp, synthetic construct
  source 1..20: mol_type = other DNA
gaattaatgacatgttgcct

SEQ ID NO: 616 - DNA, 20 bp, synthetic construct
  source 1..20: mol_type = other DNA
gtaactccacaattctacga

SEQ ID NO: 617 - DNA, 20 bp, synthetic construct
  source 1..20: mol_type = other DNA
agatcttaaaccaattctac

SEQ ID NO: 618 - DNA, 20 bp, synthetic construct
  source 1..20: mol_type = other DNA
tgatattgacaagtctggtc

SEQ ID NO: 619 - DNA, 20 bp, synthetic construct
  source 1..20: mol_type = other DNA
attatatccaattagaaatg

SEQ ID NO: 620 - DNA, 20 bp, synthetic construct
  source 1..20: mol_type = other DNA
atatgggtggcatttaaatt

SEQ ID NO: 621 - DNA, 20 bp, synthetic construct
  source 1..20: mol_type = other DNA
ttgtaagctcttgcttacca

SEQ ID NO: 622 - DNA, 20 bp, synthetic construct
  source 1..20: mol_type = other DNA
gtatgggcatgaaattagac

SEQ ID NO: 623 - DNA, 20 bp, synthetic construct
  source 1..20: mol_type = other DNA
ttaactgtgttagaatgctt

SEQ ID NO: 624 - DNA, 20 bp, synthetic construct
  source 1..20: mol_type = other DNA
aaagacaaccaacagaacag

SEQ ID NO: 625 - DNA, 20 bp, synthetic construct
  source 1..20: mol_type = other DNA
caagctgcctaatatacaca

SEQ ID NO: 626 - DNA, 20 bp, synthetic construct
  source 1..20: mol_type = other DNA
gctcttggtgtcatggcaaa

SEQ ID NO: 627 - DNA, 20 bp, synthetic construct
  source 1..20: mol_type = other DNA
caaaagccatactgagcaaa

SEQ ID NO: 628 - DNA, 20 bp, synthetic construct
  source 1..20: mol_type = other DNA
aagagctggaaaacaatatt

SEQ ID NO: 629 - DNA, 20 bp, synthetic construct
  source 1..20: mol_type = other DNA
cagcatttctagacacaccc

SEQ ID NO: 630 - DNA, 20 bp, synthetic construct
  source 1..20: mol_type = other DNA
cacataaaacaatagcacca

SEQ ID NO: 631 - DNA, 20 bp, synthetic construct
  source 1..20: mol_type = other DNA
aaagacagtagctacttatg

SEQ ID NO: 632 - DNA, 20 bp, synthetic construct
  source 1..20: mol_type = other DNA
agctaggcatgagaaggttt

SEQ ID NO: 633 - DNA, 20 bp, synthetic construct
  source 1..20: mol_type = other DNA
ttaaaaagacagtacctcct

SEQ ID NO: 634 - DNA, 20 bp, synthetic construct
  source 1..20: mol_type = other DNA
tacactgtttaggacacaca

SEQ ID NO: 635 - DNA, 20 bp, synthetic construct
  source 1..20: mol_type = other DNA
cacacactttaaatacaggg

SEQ ID NO: 636 - DNA, 20 bp, synthetic construct
  source 1..20: mol_type = other DNA
tcatttcttctcaagttaat

SEQ ID NO: 637 - DNA, 20 bp, synthetic construct
  source 1..20: mol_type = other DNA
ccctcagacttgatcaagtc

SEQ ID NO: 638 - DNA, 20 bp, synthetic construct
  source 1..20: mol_type = other DNA
aatgcccatgtagttacatg

SEQ ID NO: 639 - DNA, 20 bp, synthetic construct
  source 1..20: mol_type = other DNA
atcactgcagatttaatgaa

SEQ ID NO: 640 - DNA, 20 bp, synthetic construct
  source 1..20: mol_type = other DNA
aaaaattgatttctgaaaca

SEQ ID NO: 641 - DNA, 20 bp, synthetic construct
  source 1..20: mol_type = other DNA
gcacaagtcataagagatca

SEQ ID NO: 642 - DNA, 20 bp, synthetic construct
  source 1..20: mol_type = other DNA
gggattacctggctaatttt

SEQ ID NO: 643 - DNA, 20 bp, synthetic construct
  source 1..20: mol_type = other DNA
tatggtatgtggcaaggcca

SEQ ID NO: 644 - DNA, 20 bp, synthetic construct
  source 1..20: mol_type = other DNA
aggaaagaaggactgggttg

SEQ ID NO: 645 - DNA, 20 bp, synthetic construct
  source 1..20: mol_type = other DNA
ttttgcagataacatccctt

SEQ ID NO: 646 - DNA, 20 bp, synthetic construct
  source 1..20: mol_type = other DNA
aggagcgggcggcgcgctgg

SEQ ID NO: 647 - DNA, 20 bp, synthetic construct
  source 1..20: mol_type = other DNA
ctccgccgcgccggccgctg

SEQ ID NO: 648 - DNA, 20 bp, synthetic construct
  source 1..20: mol_type = other DNA
aggcgcgggttggcgcggcc

SEQ ID NO: 649 - DNA, 20 bp, synthetic construct
  source 1..20: mol_type = other DNA
cgtagacactacaccataat

SEQ ID NO: 650 - DNA, 20 bp, synthetic construct
  source 1..20: mol_type = other DNA
tctatttctttgtccaggag

SEQ ID NO: 651 - DNA, 20 bp, synthetic construct
  source 1..20: mol_type = other DNA
cagctctgttcgatgcagga

SEQ ID NO: 652 - DNA, 20 bp, synthetic construct
  source 1..20: mol_type = other DNA
gaaagaatccttagcacttg

SEQ ID NO: 653 - DNA, 20 bp, synthetic construct
  source 1..20: mol_type = other DNA
gtcttggcttgattcactgg

SEQ ID NO: 654 - DNA, 20 bp, synthetic construct
  source 1..20: mol_type = other DNA
aagcagtagaagggaggagg

SEQ ID NO: 655 - DNA, 20 bp, synthetic construct
  source 1..20: mol_type = other DNA
agttcctaaatgcctctact

SEQ ID NO: 656 - DNA, 20 bp, synthetic construct
  source 1..20: mol_type = other DNA
gcagtaatagcagcaagaat

SEQ ID NO: 657 - DNA, 20 bp, synthetic construct
  source 1..20: mol_type = other DNA
aagtttttcccttaacttaa

SEQ ID NO: 658 - DNA, 20 bp, synthetic construct
  source 1..20: mol_type = other DNA
gagtcgcatctctagcccac

SEQ ID NO: 659 - DNA, 20 bp, synthetic construct
  source 1..20: mol_type = other DNA
cacttgtctccaccccgtcc

SEQ ID NO: 660 - DNA, 20 bp, synthetic construct
  source 1..20: mol_type = other DNA
ttctccactgcggcctcgaa

SEQ ID NO: 661 - DNA, 20 bp, synthetic construct
  source 1..20: mol_type = other DNA
attatgaaatgtttcttaaa

SEQ ID NO: 662 - DNA, 20 bp, synthetic construct
  source 1..20: mol_type = other DNA
tttttggtctaacttcagag

SEQ ID NO: 663 - DNA, 20 bp, synthetic construct
  source 1..20: mol_type = other DNA
gagaggtgtaataaaatcct

SEQ ID NO: 664 - DNA, 20 bp, synthetic construct
  source 1..20: mol_type = other DNA
tgttcaataaagcctctcaa

SEQ ID NO: 665 - DNA, 20 bp, synthetic construct
  source 1..20: mol_type = other DNA
aattatttcaataatgcaat

SEQ ID NO: 666 - DNA, 20 bp, synthetic construct
  source 1..20: mol_type = other DNA
aacagaaaatattaagactt

SEQ ID NO: 667 - DNA, 20 bp, synthetic construct
  source 1..20: mol_type = other DNA
cagctactaaggaggcagaa

SEQ ID NO: 668 - DNA, 20 bp, synthetic construct
  source 1..20: mol_type = other DNA
tgagtcactgagactgtaga

SEQ ID NO: 669 - DNA, 20 bp, synthetic construct
  source 1..20: mol_type = other DNA
ccggattgttttcttcatta

SEQ ID NO: 670 - DNA, 20 bp, synthetic construct
  source 1..20: mol_type = other DNA
attttgaagccctttttctt

SEQ ID NO: 671 - DNA, 20 bp, synthetic construct
  source 1..20: mol_type = other DNA
acaattaccattcacacaag

SEQ ID NO: 672 - DNA, 20 bp, synthetic construct
  source 1..20: mol_type = other DNA
cgcccgccaccacatccccg

SEQ ID NO: 673 - DNA, 20 bp, synthetic construct
  source 1..20: mol_type = other DNA
gtttgcccatcctcacactg

SEQ ID NO: 674 - DNA, 20 bp, synthetic construct
  source 1..20: mol_type = other DNA
atacatgataaccgaaggta

SEQ ID NO: 675 - DNA, 20 bp, synthetic construct
  source 1..20: mol_type = other DNA
ggaaagagagctgggaggac

SEQ ID NO: 676 - DNA, 20 bp, synthetic construct
  source 1..20: mol_type = other DNA
aagctatataaaagacttaa

SEQ ID NO: 677 - DNA, 20 bp, synthetic construct
  source 1..20: mol_type = other DNA
ctttccttgccaactctctc

SEQ ID NO: 678 - DNA, 20 bp, synthetic construct
  source 1..20: mol_type = other DNA
taagaccagaaagccaaagg

SEQ ID NO: 679 - DNA, 20 bp, synthetic construct
  source 1..20: mol_type = other DNA
ccaggacctccttcagatac

SEQ ID NO: 680 - DNA, 20 bp, synthetic construct
  source 1..20: mol_type = other DNA
ctcctaagtctaagagaaag

SEQ ID NO: 681 - DNA, 20 bp, synthetic construct
  source 1..20: mol_type = other DNA
aacactctatctatccattc

SEQ ID NO: 682 - DNA, 20 bp, synthetic construct
  source 1..20: mol_type = other DNA
tgatttttcactaaatgtga

SEQ ID NO: 683 - DNA, 20 bp, synthetic construct
  source 1..20: mol_type = other DNA
cacaccagcacaccaggcta

SEQ ID NO: 684 - DNA, 20 bp, synthetic construct
  source 1..20: mol_type = other DNA
cttataaagtccttctccac

SEQ ID NO: 685 - DNA, 20 bp, synthetic construct
  source 1..20: mol_type = other DNA
tttagaaatggtatcagtta

SEQ ID NO: 686 - DNA, 20 bp, synthetic construct
  source 1..20: mol_type = other DNA
taaacaaaatgtagtgtacc

SEQ ID NO: 687 - DNA, 20 bp, synthetic construct
  source 1..20: mol_type = other DNA
aaaaaacagttattccctgg

SEQ ID NO: 688 - DNA, 20 bp, synthetic construct
  source 1..20: mol_type = other DNA
attcagaatgtacttaaatt

SEQ ID NO: 689 - DNA, 20 bp, synthetic construct
  source 1..20: mol_type = other DNA
taaaaactataaaatgacat

SEQ ID NO: 690 - DNA, 20 bp, synthetic construct
  source 1..20: mol_type = other DNA
cagaatttaggttgtgttaa

SEQ ID NO: 691 - DNA, 20 bp, synthetic construct
  source 1..20: mol_type = other DNA
gagatggagcttgctctttc

SEQ ID NO: 692 - DNA, 20 bp, synthetic construct
  source 1..20: mol_type = other DNA
aaagtttgagaattaatgac

SEQ ID NO: 693 - DNA, 20 bp, synthetic construct
  source 1..20: mol_type = other DNA
ctcagaagtggcaactctgg

SEQ ID NO: 694 - DNA, 20 bp, synthetic construct
  source 1..20: mol_type = other DNA
acagatcttaaaccaattct

SEQ ID NO: 695 - DNA, 20 bp, synthetic construct
  source 1..20: mol_type = other DNA
tatgtaaactattttaagta

SEQ ID NO: 696 - DNA, 20 bp, synthetic construct
  source 1..20: mol_type = other DNA
gataatttcacataataaat

SEQ ID NO: 697 - DNA, 20 bp, synthetic construct
  source 1..20: mol_type = other DNA
gaaaacaggtttttaatata

SEQ ID NO: 698 - DNA, 20 bp, synthetic construct
  source 1..20: mol_type = other DNA
tgtttgtttgttttaagtat

SEQ ID NO: 699 - DNA, 20 bp, synthetic construct
  source 1..20: mol_type = other DNA
actgtatacataacgcattt

SEQ ID NO: 700 - DNA, 20 bp, synthetic construct
  source 1..20: mol_type = other DNA
cgtctgtggagaaagaagta

SEQ ID NO: 701 - DNA, 20 bp, synthetic construct
  source 1..20: mol_type = other DNA
aaaatcagataaattggact

SEQ ID NO: 702 - DNA, 20 bp, synthetic construct
  source 1..20: mol_type = other DNA
ttgcccaagctgcctaatat

SEQ ID NO: 703 - DNA, 20 bp, synthetic construct
  source 1..20: mol_type = other DNA
ttaggacaacggacctaagc

SEQ ID NO: 704 - DNA, 20 bp, synthetic construct
  source 1..20: mol_type = other DNA
agcaaaagccatactgagca

SEQ ID NO: 705 - DNA, 20 bp, synthetic construct
  source 1..20: mol_type = other DNA
aaatcacacatagactaaaa

SEQ ID NO: 706 - DNA, 20 bp, synthetic construct
  source 1..20: mol_type = other DNA
tcagccccagtacaataaag

SEQ ID NO: 707 - DNA, 20 bp, synthetic construct
  source 1..20: mol_type = other DNA
taagtaaaaggaagagtatg

SEQ ID NO: 708 - DNA, 20 bp, synthetic construct
  source 1..20: mol_type = other DNA
gctgaaaagacagtagctac

SEQ ID NO: 709 - DNA, 20 bp, synthetic construct
  source 1..20: mol_type = other DNA
gctagagagctaggcatgag

SEQ ID NO: 710 - DNA, 20 bp, synthetic construct
  source 1..20: mol_type = other DNA
atcatttctattaaaaagac

SEQ ID NO: 711 - DNA, 20 bp, synthetic construct
  source 1..20: mol_type = other DNA
attactacactgtttaggac

SEQ ID NO: 712 - DNA, 20 bp, synthetic construct
  source 1..20: mol_type = other DNA
cacaaaaagacacttgttat

SEQ ID NO: 713 - DNA, 20 bp, synthetic construct
  source 1..20: mol_type = other DNA
aaaaaatgtacaaaacctta

SEQ ID NO: 714 - DNA, 20 bp, synthetic construct
  source 1..20: mol_type = other DNA
attctgcttcatccttcagg

SEQ ID NO: 715 - DNA, 20 bp, synthetic construct
  source 1..20: mol_type = other DNA
gttcaggacatctaaactta

SEQ ID NO: 716 - DNA, 20 bp, synthetic construct
  source 1..20: mol_type = other DNA
aaggctttgaaagtctaata

SEQ ID NO: 717 - DNA, 20 bp, synthetic construct
  source 1..20: mol_type = other DNA
ataccaagcttgtggcttgg

SEQ ID NO: 718 - DNA, 20 bp, synthetic construct
  source 1..20: mol_type = other DNA
atgcacaagtcataagagat

SEQ ID NO: 719 - DNA, 20 bp, synthetic construct
  source 1..20: mol_type = other DNA
ttgtttaatttttgacagag

SEQ ID NO: 720 - DNA, 20 bp, synthetic construct
  source 1..20: mol_type = other DNA
tggagcaatgtcctgagggc

SEQ ID NO: 721 - DNA, 20 bp, synthetic construct
  source 1..20: mol_type = other DNA
atatagacatagcaaagcag

SEQ ID NO: 722 - DNA, 20 bp, synthetic construct
  source 1..20: mol_type = other DNA
atgcttcagaatcaggctgc

SEQ ID NO: 723 - DNA, 20 bp, synthetic construct
  source 1..20: mol_type = other DNA
ctttaccggaagtcggaggg

SEQ ID NO: 724 - DNA, 20 bp, synthetic construct
  source 1..20: mol_type = other DNA
gcccgctccgccgcgccggc

SEQ ID NO: 725 - DNA, 20 bp, synthetic construct
  source 1..20: mol_type = other DNA
cgggcgcgccaaggagacgc

SEQ ID NO: 726 - DNA, 20 bp, synthetic construct
  source 1..20: mol_type = other DNA
ggcactgtatacgaagataa

SEQ ID NO: 727 - DNA, 20 bp, synthetic construct
  source 1..20: mol_type = other DNA
tctctatttctttgtccagg

SEQ ID NO: 728 - DNA, 20 bp, synthetic construct
  source 1..20: mol_type = other DNA
acagctctgttcgatgcagg

SEQ ID NO: 729 - DNA, 20 bp, synthetic construct
  source 1..20: mol_type = other DNA
tgaaagaatccttagcactt

SEQ ID NO: 730 - DNA, 20 bp, synthetic construct
  source 1..20: mol_type = other DNA
tgtcttggcttgattcactg

SEQ ID NO: 731 - DNA, 20 bp, synthetic construct
  source 1..20: mol_type = other DNA
ggtagaagcagtagaaggga

SEQ ID NO: 732 - DNA, 20 bp, synthetic construct
  source 1..20: mol_type = other DNA
ccccaagttcctaaatgcct

SEQ ID NO: 733 - DNA, 20 bp, synthetic construct
  source 1..20: mol_type = other DNA
ttttagcagtaatagcagca

SEQ ID NO: 734 - DNA, 20 bp, synthetic construct
  source 1..20: mol_type = other DNA
agtaaaagtttttcccttaa

SEQ ID NO: 735 - DNA, 20 bp, synthetic construct
  source 1..20: mol_type = other DNA
caactgagtcgcatctctag

SEQ ID NO: 736 - DNA, 20 bp, synthetic construct
  source 1..20: mol_type = other DNA
aggcccacttgtctccaccc

SEQ ID NO: 737 - DNA, 20 bp, synthetic construct
  source 1..20: mol_type = other DNA
gcgccttctccactgcggcc

SEQ ID NO: 738 - DNA, 20 bp, synthetic construct
  source 1..20: mol_type = other DNA
ttatctttcctaaaacagcc

SEQ ID NO: 739 - DNA, 20 bp, synthetic construct
  source 1..20: mol_type = other DNA
aatgtcaattaacttttttg

SEQ ID NO: 740 - DNA, 20 bp, synthetic construct
  source 1..20: mol_type = other DNA
gacaggagaaatgcttggcc

SEQ ID NO: 741 - DNA, 20 bp, synthetic construct
  source 1..20: mol_type = other DNA
cattggcaacactgttcaat

SEQ ID NO: 742 - DNA, 20 bp, synthetic construct
  source 1..20: mol_type = other DNA
aacaattatttcaataatgc

SEQ ID NO: 743 - DNA, 20 bp, synthetic construct
  source 1..20: mol_type = other DNA
cataaaaacagaaaatatta

SEQ ID NO: 744 - DNA, 20 bp, synthetic construct
  source 1..20: mol_type = other DNA
aagatgacaacggaacggga

SEQ ID NO: 745 - DNA, 20 bp, synthetic construct
  source 1..20: mol_type = other DNA
ctgcacgccactgtactcca

SEQ ID NO: 746 - DNA, 20 bp, synthetic construct
  source 1..20: mol_type = other DNA
ctgacaataatcaccggatt

SEQ ID NO: 747 - DNA, 20 bp, synthetic construct
  source 1..20: mol_type = other DNA
ccatctcaactctcattatt

SEQ ID NO: 748 - DNA, 20 bp, synthetic construct
  source 1..20: mol_type = other DNA
gccagattaatccggtcata

SEQ ID NO: 749 - DNA, 20 bp, synthetic construct
  source 1..20: mol_type = other DNA
attctgtaaggctactactg

SEQ ID NO: 750 - DNA, 20 bp, synthetic construct
  source 1..20: mol_type = other DNA
tgatttttatgttcctcaag

SEQ ID NO: 751 - DNA, 20 bp, synthetic construct
  source 1..20: mol_type = other DNA
atctgaatctaatcataagg

SEQ ID NO: 752 - DNA, 20 bp, synthetic construct
  source 1..20: mol_type = other DNA
ggccagaactagggaaagag

SEQ ID NO: 753 - DNA, 20 bp, synthetic construct
  source 1..20: mol_type = other DNA
cacgaactgtccttaaactc

SEQ ID NO: 754 - DNA, 20 bp, synthetic construct
  source 1..20: mol_type = other DNA
tcatatgattacaactgcag

SEQ ID NO: 755 - DNA, 20 bp, synthetic construct
  source 1..20: mol_type = other DNA
taacattccaaaatttaaga

SEQ ID NO: 756 - DNA, 20 bp, synthetic construct
  source 1..20: mol_type = other DNA
acaatacactgaactcttga

SEQ ID NO: 757 - DNA, 20 bp, synthetic construct
  source 1..20: mol_type = other DNA
aatacccagtactgttagcc

SEQ ID NO: 758 - DNA, 20 bp, synthetic construct
  source 1..20: mol_type = other DNA
tgaaatcaattcatatcttt

SEQ ID NO: 759 - DNA, 20 bp, synthetic construct
  source 1..20: mol_type = other DNA
atggagatcttttccattaa

SEQ ID NO: 760 - DNA, 20 bp, synthetic construct
  source 1..20: mol_type = other DNA
tactaaaatctacacaattc

SEQ ID NO: 761 - DNA, 20 bp, synthetic construct
  source 1..20: mol_type = other DNA
agtcatgcttataaagtcct

SEQ ID NO: 762 - DNA, 20 bp, synthetic construct
  source 1..20: mol_type = other DNA
acttaaaatttgaactgaaa

SEQ ID NO: 763 - DNA, 20 bp, synthetic construct
  source 1..20: mol_type = other DNA
acccggcccacacaaaaact

SEQ ID NO: 764 - DNA, 20 bp, synthetic construct
  source 1..20: mol_type = other DNA
ggttcaagcaaattgcttgt

SEQ ID NO: 765 - DNA, 20 bp, synthetic construct
  source 1..20: mol_type = other DNA
gtatgatgacaaaagaggac

SEQ ID NO: 766 - DNA, 20 bp, synthetic construct
  source 1..20: mol_type = other DNA
ttttaaagggccagaataat

SEQ ID NO: 767 - DNA, 20 bp, synthetic construct
  source 1..20: mol_type = other DNA
ctgaccagaatttaggttgt

SEQ ID NO: 768 - DNA, 20 bp, synthetic construct
  source 1..20: mol_type = other DNA
tttgagatggagcttgctct

SEQ ID NO: 769 - DNA, 20 bp, synthetic construct
  source 1..20: mol_type = other DNA
cattatattaggttatatat

SEQ ID NO: 770 - DNA, 20 bp, synthetic construct
  source 1..20: mol_type = other DNA
aaatggttttaccattagca

SEQ ID NO: 771 - DNA, 20 bp, synthetic construct
  source 1..20: mol_type = other DNA
tttccaagatcaccataacc

SEQ ID NO: 772 - DNA, 20 bp, synthetic construct
  source 1..20: mol_type = other DNA
tatgtctaaaaaattttatt

SEQ ID NO: 773 - DNA, 20 bp, synthetic construct
  source 1..20: mol_type = other DNA
agggttaattaggatctata

SEQ ID NO: 774 - DNA, 20 bp, synthetic construct
  source 1..20: mol_type = other DNA
aacttgctcttcaaggttag

SEQ ID NO: 775 - DNA, 20 bp, synthetic construct
  source 1..20: mol_type = other DNA
ttttaaaggttctctggact

SEQ ID NO: 776 - DNA, 20 bp, synthetic construct
  source 1..20: mol_type = other DNA
tatggtttgatgtttctgac

SEQ ID NO: 777 - DNA, 20 bp, synthetic construct
  source 1..20: mol_type = other DNA
ccctccccctccttctcctt

SEQ ID NO: 778 - DNA, 20 bp, synthetic construct
  source 1..20: mol_type = other DNA
aaagaaaaaaaaagttgctc

SEQ ID NO: 779 - DNA, 20 bp, synthetic construct
  source 1..20: mol_type = other DNA
ttaacttctctttgcccaag

SEQ ID NO: 780 - DNA, 20 bp, synthetic construct
  source 1..20: mol_type = other DNA
agtacaagcaacaaaaacag

SEQ ID NO: 781 - DNA, 20 bp, synthetic construct
  source 1..20: mol_type = other DNA
aaagagcaaaagccatactg

SEQ ID NO: 782 - DNA, 20 bp, synthetic construct
  source 1..20: mol_type = other DNA
acacactttacctataaaat

SEQ ID NO: 783 - DNA, 20 bp, synthetic construct
  source 1..20: mol_type = other DNA
tgtgccagcttcagatatga

SEQ ID NO: 784 - DNA, 20 bp, synthetic construct
  source 1..20: mol_type = other DNA
aatagtctaagtaaaaggaa

SEQ ID NO: 785 - DNA, 20 bp, synthetic construct
  source 1..20: mol_type = other DNA
ctggccaatcaacaaacact

SEQ ID NO: 786 - DNA, 20 bp, synthetic construct
  source 1..20: mol_type = other DNA
gttttatattgctagagagc

SEQ ID NO: 787 - DNA, 20 bp, synthetic construct
  source 1..20: mol_type = other DNA
tgctcccagcctcatatgaa

SEQ ID NO: 788 - DNA, 20 bp, synthetic construct
  source 1..20: mol_type = other DNA
ttaaaaaaatgaaatatgca

SEQ ID NO: 789 - DNA, 20 bp, synthetic construct
  source 1..20: mol_type = other DNA
cagaaacaaattcaaccaca

SEQ ID NO: 790 - DNA, 20 bp, synthetic construct
  source 1..20: mol_type = other DNA
aaaagaacctacctaaggca

SEQ ID NO: 791 - DNA, 20 bp, synthetic construct
  source 1..20: mol_type = other DNA
tattaaaagtttttttatat

SEQ ID NO: 792 - DNA, 20 bp, synthetic construct
  source 1..20: mol_type = other DNA
ccagaaatctgtaaattctt

SEQ ID NO: 793 - DNA, 20 bp, synthetic construct
  source 1..20: mol_type = other DNA
tgtacttcaaattttgttta

SEQ ID NO: 794 - DNA, 20 bp, synthetic construct
  source 1..20: mol_type = other DNA
tataccaagcttgtggcttg

SEQ ID NO: 795 - DNA, 20 bp, synthetic construct
  source 1..20: mol_type = other DNA
gtttaatttgtaactaggtt

SEQ ID NO: 796 - DNA, 20 bp, synthetic construct
  source 1..20: mol_type = other DNA
atgtatttatttgtttaatt

SEQ ID NO: 797 - DNA, 20 bp, synthetic construct
  source 1..20: mol_type = other DNA
caagtgcattttaggtgcac

SEQ ID NO: 798 - DNA, 20 bp, synthetic construct
  source 1..20: mol_type = other DNA
ctatatagacatagcaaagc

SEQ ID NO: 799 - DNA, 20 bp, synthetic construct
  source 1..20: mol_type = other DNA
atatcatacaagattcaatg

SEQ ID NO: 800 - DNA, 20 bp, synthetic construct
  source 1..20: mol_type = other DNA
ggactctttaccggaagtcg

SEQ ID NO: 801 - DNA, 20 bp, synthetic construct
  source 1..20: mol_type = other DNA
gccccgcccgctccgccgcg

SEQ ID NO: 802 - DNA, 20 bp, synthetic construct
  source 1..20: mol_type = other DNA
ggagccgggcgcgccaagga

SEQ ID NO: 803 - DNA, 20 bp, synthetic construct
  source 1..20: mol_type = other DNA
ttgcccttgcttcccgtttt

SEQ ID NO: 804 - DNA, 20 bp, synthetic construct
  source 1..20: mol_type = other DNA
ttctctatttctttgtccag

SEQ ID NO: 805 - DNA, 20 bp, synthetic construct
  source 1..20: mol_type = other DNA
taacagctctgttcgatgca

SEQ ID NO: 806 - DNA, 20 bp, synthetic construct
  source 1..20: mol_type = other DNA
aatgaaagaatccttagcac

SEQ ID NO: 807 - DNA, 20 bp, synthetic construct
  source 1..20: mol_type = other DNA
tatgtcttggcttgattcac

SEQ ID NO: 808 - DNA, 20 bp, synthetic construct
  source 1..20: mol_type = other DNA
cagttggtagaagcagtaga

SEQ ID NO: 809 - DNA, 20 bp, synthetic construct
  source 1..20: mol_type = other DNA
atagcccccaagttcctaaa

SEQ ID NO: 810 - DNA, 20 bp, synthetic construct
  source 1..20: mol_type = other DNA
tttttttttagcagtaatag

SEQ ID NO: 811 - DNA, 20 bp, synthetic construct
  source 1..20: mol_type = other DNA
tacaaagtaaaagtttttcc

SEQ ID NO: 812 - DNA, 20 bp, synthetic construct
  source 1..20: mol_type = other DNA
agatccaactgagtcgcatc

SEQ ID NO: 813 - DNA, 20 bp, synthetic construct
  source 1..20: mol_type = other DNA
tcggacacgaacgcagaggg

SEQ ID NO: 814 - DNA, 20 bp, synthetic construct
  source 1..20: mol_type = other DNA
ttcgacctcgatgttccaca

SEQ ID NO: 815 - DNA, 20 bp, synthetic construct
  source 1..20: mol_type = other DNA
caaaattagattacagtaaa

SEQ ID NO: 816 - DNA, 20 bp, synthetic construct
  source 1..20: mol_type = other DNA
aacaaaacatgtctctttgg

SEQ ID NO: 817 - DNA, 20 bp, synthetic construct
  source 1..20: mol_type = other DNA
cagcatgatcttgtgtatat

SEQ ID NO: 818 - DNA, 20 bp, synthetic construct
  source 1..20: mol_type = other DNA
aaggaaatttaaaaaaaaac

SEQ ID NO: 819 - DNA, 20 bp, synthetic construct
  source 1..20: mol_type = other DNA
cctcggcaactaagagcgaa

SEQ ID NO: 820 - DNA, 20 bp, synthetic construct
  source 1..20: mol_type = other DNA
tcccatctcaaaaaataaat

SEQ ID NO: 821 - DNA, 20 bp, synthetic construct
  source 1..20: mol_type = other DNA
aggtactcagcaagctgagg

SEQ ID NO: 822 - DNA, 20 bp, synthetic construct
  source 1..20: mol_type = other DNA
gccactttggaaggtcgagg

SEQ ID NO: 823 - DNA, 20 bp, synthetic construct
  source 1..20: mol_type = other DNA
aaagcatggttgattgaaga

SEQ ID NO: 824 - DNA, 20 bp, synthetic construct
  source 1..20: mol_type = other DNA
ctaaagctgagtgacaggta

SEQ ID NO: 825 - DNA, 20 bp, synthetic construct
  source 1..20: mol_type = other DNA
cttgttgttgtttacattat

SEQ ID NO: 826 - DNA, 20 bp, synthetic construct
  source 1..20: mol_type = other DNA
aagaaatacattctgtaagg

SEQ ID NO: 827 - DNA, 20 bp, synthetic construct
  source 1..20: mol_type = other DNA
aaactttccatttcaaagct

SEQ ID NO: 828 - DNA, 20 bp, synthetic construct
  source 1..20: mol_type = other DNA
aacttagtagacacaactct

SEQ ID NO: 829 - DNA, 20 bp, synthetic construct
  source 1..20: mol_type = other DNA
gctaaattgtagttgtctag

SEQ ID NO: 830 - DNA, 20 bp, synthetic construct
  source 1..20: mol_type = other DNA
tctggtatcctggtggctgc

SEQ ID NO: 831 - DNA, 20 bp, synthetic construct
  source 1..20: mol_type = other DNA
aaagaaaaacaggtcatatg

SEQ ID NO: 832 - DNA, 20 bp, synthetic construct
  source 1..20: mol_type = other DNA
ttctgcccttcatgtccggt

SEQ ID NO: 833 - DNA, 20 bp, synthetic construct
  source 1..20: mol_type = other DNA
atattaggtattcactaaca

SEQ ID NO: 834 - DNA, 20 bp, synthetic construct
  source 1..20: mol_type = other DNA
ggcctcttaagacaaaaagt

SEQ ID NO: 835 - DNA, 20 bp, synthetic construct
  source 1..20: mol_type = other DNA
agctcagaaatgaaatcaat

SEQ ID NO: 836 - DNA, 20 bp, synthetic construct
  source 1..20: mol_type = other DNA
accagcctgtgcaatacagg

SEQ ID NO: 837 - DNA, 20 bp, synthetic construct
  source 1..20: mol_type = other DNA
tatttctcactgttctctaa

SEQ ID NO: 838 - DNA, 20 bp, synthetic construct
  source 1..20: mol_type = other DNA
cttttacttcatgatttttt

SEQ ID NO: 839 - DNA, 20 bp, synthetic construct
  source 1..20: mol_type = other DNA
agtaattttatgtttttaaa

SEQ ID NO: 840 - DNA, 20 bp, synthetic construct
  source 1..20: mol_type = other DNA
tccacacgcagttttttttt

SEQ ID NO: 841 - DNA, 20 bp, synthetic construct
  source 1..20: mol_type = other DNA
tttcccatataatttttttt

SEQ ID NO: 842 - DNA, 20 bp, synthetic construct
  source 1..20: mol_type = other DNA
caggtggagccacgctcctc

SEQ ID NO: 843 - DNA, 20 bp, synthetic construct
  source 1..20: mol_type = other DNA
gggtatccccagccccatac

SEQ ID NO: 844 - DNA, 20 bp, synthetic construct
  source 1..20: mol_type = other DNA
tagaagctcagtattaaaaa

SEQ ID NO: 845 - DNA, 20 bp, synthetic construct
  source 1..20: mol_type = other DNA
gtaattactctgcatgtctc

SEQ ID NO: 846 - DNA, 20 bp, synthetic construct
  source 1..20: mol_type = other DNA
cgtgatgtacagacttgaga

SEQ ID NO: 847 - DNA, 20 bp, synthetic construct
  source 1..20: mol_type = other DNA
ctttagaaatggttttacca

SEQ ID NO: 848 - DNA, 20 bp, synthetic construct
  source 1..20: mol_type = other DNA
gctcttcaagatcttggatt

SEQ ID NO: 849 - DNA, 20 bp, synthetic construct
  source 1..20: mol_type = other DNA
ttgcacataggttagaattt

SEQ ID NO: 850 - DNA, 20 bp, synthetic construct
  source 1..20: mol_type = other DNA
aaagggttaattaggatcta

SEQ ID NO: 851 - DNA, 20 bp, synthetic construct
  source 1..20: mol_type = other DNA
tctttagaagaatgctaatg

SEQ ID NO: 852 - DNA, 20 bp, synthetic construct
  source 1..20: mol_type = other DNA
ggccgatcttgtttctttta

SEQ ID NO: 853 - DNA, 20 bp, synthetic construct
  source 1..20: mol_type = other DNA
tattgttgttaccaaatctc

SEQ ID NO: 854 - DNA, 20 bp, synthetic construct
  source 1..20: mol_type = other DNA
ggaagaatacctacagcaag

SEQ ID NO: 855 - DNA, 20 bp, synthetic construct
  source 1..20: mol_type = other DNA
ctgagcaccaagtcactctc

SEQ ID NO: 856 - DNA, 20 bp, synthetic construct
  source 1..20: mol_type = other DNA
tgcactatgcattagttact

SEQ ID NO: 857 - DNA, 20 bp, synthetic construct
  source 1..20: mol_type = other DNA
caaaagaaagaaaacaggaa

SEQ ID NO: 858 - DNA, 20 bp, synthetic construct
  source 1..20: mol_type = other DNA
caaaaggcccaaaagagcaa

SEQ ID NO: 859 - DNA, 20 bp, synthetic construct
  source 1..20: mol_type = other DNA
taacaaaatggtagtagtta

SEQ ID NO: 860 - DNA, 20 bp, synthetic construct
  source 1..20: mol_type = other DNA
ctagacatattctggaccag

SEQ ID NO: 861 - DNA, 20 bp, synthetic construct
  source 1..20: mol_type = other DNA
gatggagaatagtctaagta

SEQ ID NO: 862 - DNA, 20 bp, synthetic construct
  source 1..20: mol_type = other DNA
tggccacgctgaccttaagt

SEQ ID NO: 863 - DNA, 20 bp, synthetic construct
  source 1..20: mol_type = other DNA
actcttagttttatattgct

SEQ ID NO: 864 - DNA, 20 bp, synthetic construct
  source 1..20: mol_type = other DNA
gttcaagcgattctgatgct

SEQ ID NO: 865 - DNA, 20 bp, synthetic construct
  source 1..20: mol_type = other DNA
cttattaattgaaatatgta

SEQ ID NO: 866 - DNA, 20 bp, synthetic construct
  source 1..20: mol_type = other DNA
gttggttttaaaaaggcaac

SEQ ID NO: 867 - DNA, 20 bp, synthetic construct
  source 1..20: mol_type = other DNA
gagaagtccctgggttacac

SEQ ID NO: 868 - DNA, 20 bp, synthetic construct
  source 1..20: mol_type = other DNA
aattataaaggaaaatccct

SEQ ID NO: 869 - DNA, 20 bp, synthetic construct
  source 1..20: mol_type = other DNA
tatgaaaagtagtaatgtct

SEQ ID NO: 870 - DNA, 20 bp, synthetic construct
  source 1..20: mol_type = other DNA
ttataaaatataaattgttc

SEQ ID NO: 871 - DNA, 20 bp, synthetic construct
  source 1..20: mol_type = other DNA
ttataccaagcttgtggctt

SEQ ID NO: 872 - DNA, 20 bp, synthetic construct
  source 1..20: mol_type = other DNA
cagaaagctgtgtgtttaat

SEQ ID NO: 873 - DNA, 20 bp, synthetic construct
  source 1..20: mol_type = other DNA
cgaacctgagtttgttgtac

SEQ ID NO: 874 - DNA, 20 bp, synthetic construct
  source 1..20: mol_type = other DNA
aaaaggcaacttgaaggcat

SEQ ID NO: 875 - DNA, 20 bp, synthetic construct
  source 1..20: mol_type = other DNA
tgtacacatatatatagtag

SEQ ID NO: 876 - DNA, 20 bp, synthetic construct
  source 1..20: mol_type = other DNA
caacttaatatcatacaaga

SEQ ID NO: 877 - DNA, 20 bp, synthetic construct
  source 1..20: mol_type = other DNA
gatagggactctttaccgga

SEQ ID NO: 878 - DNA, 20 bp, synthetic construct
  source 1..20: mol_type = other DNA
ccgccgccccgcccgctccg

SEQ ID NO: 879 - DNA, 20 bp, synthetic construct
  source 1..20: mol_type = other DNA
gccgctgccgccgggcttgc

SEQ ID NO: 880 - DNA, 20 bp, synthetic construct
  source 1..20: mol_type = other DNA
gtttgcccttgcttcccgtt

SEQ ID NO: 881 - DNA, 20 bp, synthetic construct
  source 1..20: mol_type = other DNA
cttctctatttctttgtcca

SEQ ID NO: 882 - DNA, 20 bp, synthetic construct
  source 1..20: mol_type = other DNA
gtaacagctctgttcgatgc

SEQ ID NO: 883 - DNA, 20 bp, synthetic construct
  source 1..20: mol_type = other DNA
gtgttactaagtattgaagg

SEQ ID NO: 884 - DNA, 20 bp, synthetic construct
  source 1..20: mol_type = other DNA
tgtgttggtggtgccatcat

SEQ ID NO: 885 - DNA, 20 bp, synthetic construct
  source 1..20: mol_type = other DNA
gcttccagttggtagaagca

SEQ ID NO: 886 - DNA, 20 bp, synthetic construct
  source 1..20: mol_type = other DNA
atggaatagcccccaagttc

SEQ ID NO: 887 - DNA, 20 bp, synthetic construct
  source 1..20: mol_type = other DNA
aagtcttgattttttttttt

SEQ ID NO: 888 - DNA, 20 bp, synthetic construct
  source 1..20: mol_type = other DNA
ttatctacaaagtaaaagtt

SEQ ID NO: 889 - DNA, 20 bp, synthetic construct
  source 1..20: mol_type = other DNA
gagatagatccaactgagtc

SEQ ID NO: 890 - DNA, 20 bp, synthetic construct
  source 1..20: mol_type = other DNA
ccgcctcggacacgaacgca

SEQ ID NO: 891 - DNA, 20 bp, synthetic construct
  source 1..20: mol_type = other DNA
actgtttcgacctcgatgtt

SEQ ID NO: 892 - DNA, 20 bp, synthetic construct
  source 1..20: mol_type = other DNA
atgaacccaggagacagaga

SEQ ID NO: 893 - DNA, 20 bp, synthetic construct
  source 1..20: mol_type = other DNA
aaaaagtttattttctccac

SEQ ID NO: 894 - DNA, 20 bp, synthetic construct
  source 1..20: mol_type = other DNA
ggtttcatgccattctcttg

SEQ ID NO: 895 - DNA, 20 bp, synthetic construct
  source 1..20: mol_type = other DNA
taattaaagcactttgggaa

SEQ ID NO: 896 - DNA, 20 bp, synthetic construct
  source 1..20: mol_type = other DNA
attcttggcagctgggtgca

SEQ ID NO: 897 - DNA, 20 bp, synthetic construct
  source 1..20: mol_type = other DNA
atgatggcacacacatgtgg

SEQ ID NO: 898 - DNA, 20 bp, synthetic construct
  source 1..20: mol_type = other DNA
ctccgaaaaattaaaaataa

SEQ ID NO: 899 - DNA, 20 bp, synthetic construct
  source 1..20: mol_type = other DNA
ttattcactactgtattccc

SEQ ID NO: 900 - DNA, 20 bp, synthetic construct
  source 1..20: mol_type = other DNA
ccagactttgcagcctacca

SEQ ID NO: 901 - DNA, 20 bp, synthetic construct
  source 1..20: mol_type = other DNA
ttcccatcttctcgagttct

SEQ ID NO: 902 - DNA, 20 bp, synthetic construct
  source 1..20: mol_type = other DNA
tcagacttcttgttgttgtt

SEQ ID NO: 903 - DNA, 20 bp, synthetic construct
  source 1..20: mol_type = other DNA
gagatagcatgccactgcac

SEQ ID NO: 904 - DNA, 20 bp, synthetic construct
  source 1..20: mol_type = other DNA
aacagcccaatcagaacaag

SEQ ID NO: 905 - DNA, 20 bp, synthetic construct
  source 1..20: mol_type = other DNA
aataactttatagtgaagaa

SEQ ID NO: 906 - DNA, 20 bp, synthetic construct
  source 1..20: mol_type = other DNA
aaaaactcacaatctcttcc

SEQ ID NO: 907 - DNA, 20 bp, synthetic construct
  source 1..20: mol_type = other DNA
atgatctggtatcctggtgg

SEQ ID NO: 908 - DNA, 20 bp, synthetic construct
  source 1..20: mol_type = other DNA
cttcccatatttctccccca

SEQ ID NO: 909 - DNA, 20 bp, synthetic construct
  source 1..20: mol_type = other DNA
ttccatcatgtgggacttat

SEQ ID NO: 910 - DNA, 20 bp, synthetic construct
  source 1..20: mol_type = other DNA
cctcatcaggcttcattcaa

SEQ ID NO: 911 - DNA, 20 bp, synthetic construct
  source 1..20: mol_type = other DNA
atcaactccaaaggtagcag

SEQ ID NO: 912 - DNA, 20 bp, synthetic construct
  source 1..20: mol_type = other DNA
aacaaacaaacattaattcg

SEQ ID NO: 913 - DNA, 20 bp, synthetic construct
  source 1..20: mol_type = other DNA
agtcaagggcatgattgaag

SEQ ID NO: 914 - DNA, 20 bp, synthetic construct
  source 1..20: mol_type = other DNA
cagaataaaacaatctgtag

SEQ ID NO: 915 - DNA, 20 bp, synthetic construct
  source 1..20: mol_type = other DNA
taaatctttaatctctttat

SEQ ID NO: 916 - DNA, 20 bp, synthetic construct
  source 1..20: mol_type = other DNA
tgtacccagccagtaatttt

SEQ ID NO: 917 - DNA, 20 bp, synthetic construct
  source 1..20: mol_type = other DNA
aaatcagcctgtgcaacagt

SEQ ID NO: 918 - DNA, 20 bp, synthetic construct
  source 1..20: mol_type = other DNA
ccctagggataccaaaatcc

SEQ ID NO: 919 - DNA, 20 bp, synthetic construct
  source 1..20: mol_type = other DNA
accaagggcacaggtggagc

SEQ ID NO: 920 - DNA, 20 bp, synthetic construct
  source 1..20: mol_type = other DNA
gctggtggtcataaagaaat

SEQ ID NO: 921 - DNA, 20 bp, synthetic construct
  source 1..20: mol_type = other DNA
tttcaagaatgtaaaatgtt

SEQ ID NO: 922 - DNA, 20 bp, synthetic construct
  source 1..20: mol_type = other DNA
acataattcattaaattata

SEQ ID NO: 923 - DNA, 20 bp, synthetic construct
  source 1..20: mol_type = other DNA
accaatagtgtaaaagaagt

SEQ ID NO: 924 - DNA, 20 bp, synthetic construct
  source 1..20: mol_type = other DNA
ctgtaaaagccacctttcag

SEQ ID NO: 925 - DNA, 20 bp, synthetic construct
  source 1..20: mol_type = other DNA
caagctcttcaagatcttgg

SEQ ID NO: 926 - DNA, 20 bp, synthetic construct
  source 1..20: mol_type = other DNA
taagttacctcagatccttt

SEQ ID NO: 927 - DNA, 20 bp, synthetic construct
  source 1..20: mol_type = other DNA
ccaaagggttaattaggatc

SEQ ID NO: 928 - DNA, 20 bp, synthetic construct
  source 1..20: mol_type = other DNA
tagccaccatgcctggcttc

SEQ ID NO: 929 - DNA, 20 bp, synthetic construct
  source 1..20: mol_type = other DNA
caattacatgaatgtgcatc

SEQ ID NO: 930 - DNA, 20 bp, synthetic construct
  source 1..20: mol_type = other DNA
atggtggtttcaaatgtcag

SEQ ID NO: 931 - DNA, 20 bp, synthetic construct
  source 1..20: mol_type = other DNA
tatatatgtaaattatatct

SEQ ID NO: 932 - DNA, 20 bp, synthetic construct
  source 1..20: mol_type = other DNA
ttgaaccccaccttatgcta

SEQ ID NO: 933 - DNA, 20 bp, synthetic construct
  source 1..20: mol_type = other DNA
gggctatgagcatgtcatga

SEQ ID NO: 934 - DNA, 20 bp, synthetic construct
  source 1..20: mol_type = other DNA
acaaaagaaagaaaacagga

SEQ ID NO: 935 - DNA, 20 bp, synthetic construct
  source 1..20: mol_type = other DNA
tataatgacaactttaaaac

SEQ ID NO: 936 - DNA, 20 bp, synthetic construct
  source 1..20: mol_type = other DNA
tacaaaacaaccagataata

SEQ ID NO: 937 - DNA, 20 bp, synthetic construct
  source 1..20: mol_type = other DNA
ctaggccatagctcccagat

SEQ ID NO: 938 - DNA, 20 bp, synthetic construct
  source 1..20: mol_type = other DNA
agtttaggaaaggtgttggg

SEQ ID NO: 939 - DNA, 20 bp, synthetic construct
  source 1..20: mol_type = other DNA
caatttaaaaaaaattgcta

SEQ ID NO: 940 - DNA, 20 bp, synthetic construct
  source 1..20: mol_type = other DNA
acattaggcacctatgataa

SEQ ID NO: 941 - DNA, 20 bp, synthetic construct
  source 1..20: mol_type = other DNA
ttgagactcactctttcact

SEQ ID NO: 942 - DNA, 20 bp, synthetic construct
  source 1..20: mol_type = other DNA
ggcaaggatgcagaacacat

SEQ ID NO: 943 - DNA, 20 bp, synthetic construct
  source 1..20: mol_type = other DNA
agccaagatatattttaaag

SEQ ID NO: 944 - DNA, 20 bp, synthetic construct
  source 1..20: mol_type = other DNA
cttcatatatggtacttcat

SEQ ID NO: 945 - DNA, 20 bp, synthetic construct
  source 1..20: mol_type = other DNA
tttcctctgaacctcttaca

SEQ ID NO: 946 - DNA, 20 bp, synthetic construct
  source 1..20: mol_type = other DNA
ttaaaacttttattcttcaa

SEQ ID NO: 947 - DNA, 20 bp, synthetic construct
  source 1..20: mol_type = other DNA
tattacaatatatttaatat

SEQ ID NO: 948 - DNA, 20 bp, synthetic construct
  source 1..20: mol_type = other DNA
tttataccaagcttgtggct

SEQ ID NO: 949 - DNA, 20 bp, synthetic construct
  source 1..20: mol_type = other DNA
ctgaagcaaattaagtacag

SEQ ID NO: 950 - DNA, 20 bp, synthetic construct
  source 1..20: mol_type = other DNA
catactcattaagtttactt

SEQ ID NO: 951 - DNA, 20 bp, synthetic construct
  source 1..20: mol_type = other DNA
tctacatatgatattaaaat

SEQ ID NO: 952 - DNA, 20 bp, synthetic construct
  source 1..20: mol_type = other DNA
actcatgtgagtaacaatca

SEQ ID NO: 953 - DNA, 20 bp, synthetic construct
  source 1..20: mol_type = other DNA
taacccttgacatttctgat

SEQ ID NO: 954 - DNA, 20 bp, synthetic construct
  source 1..20: mol_type = other DNA
tgttgtatggtaatttggga

SEQ ID NO: 955 - DNA, 20 bp, synthetic construct
  source 1..20: mol_type = other DNA
gtgcggatagggactcttta

SEQ ID NO: 956 - DNA, 20 bp, synthetic construct
  source 1..20: mol_type = other DNA
cgccaccgccgccccgcccg

SEQ ID NO: 957 - DNA, 20 bp, synthetic construct
  source 1..20: mol_type = other DNA
cttcacatttggagccaaca

SEQ ID NO: 958 - DNA, 20 bp, synthetic construct
  source 1..20: mol_type = other DNA
ggtttgcccttgcttcccgt

SEQ ID NO: 959 - DNA, 20 bp, synthetic construct
  source 1..20: mol_type = other DNA
gacttctctatttctttgtc

SEQ ID NO: 960 - DNA, 20 bp, synthetic construct
  source 1..20: mol_type = other DNA
ggtaacagctctgttcgatg

SEQ ID NO: 961 - DNA, 20 bp, synthetic construct
  source 1..20: mol_type = other DNA
ccgtgttactaagtattgaa

SEQ ID NO: 962 - DNA, 20 bp, synthetic construct
  source 1..20: mol_type = other DNA
tctgtgcttccagttggtag

SEQ ID NO: 963 - DNA, 20 bp, synthetic construct
  source 1..20: mol_type = other DNA
cagcatatggaattatggaa

SEQ ID NO: 964 - DNA, 20 bp, synthetic construct
  source 1..20: mol_type = other DNA
gttccaagtcttgatttttt

SEQ ID NO: 965 - DNA, 20 bp, synthetic construct
  source 1..20: mol_type = other DNA
ttatattatctacaaagtaa

SEQ ID NO: 966 - DNA, 20 bp, synthetic construct
  source 1..20: mol_type = other DNA
tctgagagatagatccaact

SEQ ID NO: 967 - DNA, 20 bp, synthetic construct
  source 1..20: mol_type = other DNA
cgccgccgcctcggacacga

SEQ ID NO: 968 - DNA, 20 bp, synthetic construct
  source 1..20: mol_type = other DNA
ggacggcggcgcgggccgcg

SEQ ID NO: 969 - DNA, 20 bp, synthetic construct
  source 1..20: mol_type = other DNA
ttaaatgaacccaggagaca

SEQ ID NO: 970 - DNA, 20 bp, synthetic construct
  source 1..20: mol_type = other DNA
gcccaaacttaaaaagttta

SEQ ID NO: 971 - DNA, 20 bp, synthetic construct
  source 1..20: mol_type = other DNA
gctctgcctcccgggtttca

SEQ ID NO: 972 - DNA, 20 bp, synthetic construct
  source 1..20: mol_type = other DNA
catgactttaaaaagcaata

SEQ ID NO: 973 - DNA, 20 bp, synthetic construct
  source 1..20: mol_type = other DNA
tttgaattacaatgcggtat

SEQ ID NO: 974 - DNA, 20 bp, synthetic construct
  source 1..20: mol_type = other DNA
caaggcaagaggagtacttg

SEQ ID NO: 975 - DNA, 20 bp, synthetic construct
  source 1..20: mol_type = other DNA
gagcaagatcctatctccga

SEQ ID NO: 976 - DNA, 20 bp, synthetic construct
  source 1..20: mol_type = other DNA
tgttttcctcttcatctaaa

SEQ ID NO: 977 - DNA, 20 bp, synthetic construct
  source 1..20: mol_type = other DNA
agtcttgttcagtgtccttc

SEQ ID NO: 978 - DNA, 20 bp, synthetic construct
  source 1..20: mol_type = other DNA
gaaatatttaaattttaatc

SEQ ID NO: 979 - DNA, 20 bp, synthetic construct
  source 1..20: mol_type = other DNA
ttgttcttccaatttcagac

SEQ ID NO: 980 - DNA, 20 bp, synthetic construct
  source 1..20: mol_type = other DNA
aaaattacttctcattgaca

SEQ ID NO: 981 - DNA, 20 bp, synthetic construct
  source 1..20: mol_type = other DNA
gaatcatgcctcatatgata

SEQ ID NO: 982 - DNA, 20 bp, synthetic construct
  source 1..20: mol_type = other DNA
tccacagaagctaaatatag

SEQ ID NO: 983 - DNA, 20 bp, synthetic construct
  source 1..20: mol_type = other DNA
aaattgttaaaatggtatat

SEQ ID NO: 984 - DNA, 20 bp, synthetic construct
  source 1..20: mol_type = other DNA
aacgatgatctggtatcctg

SEQ ID NO: 985 - DNA, 20 bp, synthetic construct
  source 1..20: mol_type = other DNA
cttgatttaaccaacacaga

SEQ ID NO: 986 - DNA, 20 bp, synthetic construct
  source 1..20: mol_type = other DNA
aaaatttgtgatagcttctc

SEQ ID NO: 987 - DNA, 20 bp, synthetic construct
  source 1..20: mol_type = other DNA
ttggagccctaaaaacatat

SEQ ID NO: 988 - DNA, 20 bp, synthetic construct
  source 1..20: mol_type = other DNA
aatatttcaatagtataagt

SEQ ID NO: 989 - DNA, 20 bp, synthetic construct
  source 1..20: mol_type = other DNA
cacgccactgtacccagcct

SEQ ID NO: 990 - DNA, 20 bp, synthetic construct
  source 1..20: mol_type = other DNA
gaaaaagagaacaaggaggt

SEQ ID NO: 991 - DNA, 20 bp, synthetic construct
  source 1..20: mol_type = other DNA
gaagagatccctgtttgtta

SEQ ID NO: 992 - DNA, 20 bp, synthetic construct
  source 1..20: mol_type = other DNA
ccaccttttcatacattcac

SEQ ID NO: 993 - DNA, 20 bp, synthetic construct
  source 1..20: mol_type = other DNA
taccaccgtgtctggctact

SEQ ID NO: 994 - DNA, 20 bp, synthetic construct
  source 1..20: mol_type = other DNA
tgatacagccactatgccca

SEQ ID NO: 995 - DNA, 20 bp, synthetic construct
  source 1..20: mol_type = other DNA
aataaattattccaacacac

SEQ ID NO: 996 - DNA, 20 bp, synthetic construct
  source 1..20: mol_type = other DNA
atattaaagactataatact

SEQ ID NO: 997 - DNA, 20 bp, synthetic construct
  source 1..20: mol_type = other DNA
tgccacctgctggtggtcat

SEQ ID NO: 998 - DNA, 20 bp, synthetic construct
  source 1..20: mol_type = other DNA
taaagttatgtggattgctg

SEQ ID NO: 999 - DNA, 20 bp, synthetic construct
  source 1..20: mol_type = other DNA
cagatgactatcagtaaagg

SEQ ID NO: 1000 - DNA, 20 bp, synthetic construct
  source 1..20: mol_type = other DNA
ctatcaatttatccacctca

SEQ ID NO: 1001 - DNA, 20 bp, synthetic construct
  source 1..20: mol_type = other DNA
cataaaatagccttcagatc

SEQ ID NO: 1002 - DNA, 20 bp, synthetic construct
  source 1..20: mol_type = other DNA
ctagctcctcctcattctgt

SEQ ID NO: 1003 - DNA, 20 bp, synthetic construct
  source 1..20: mol_type = other DNA
ccttagactaagggttgttt

SEQ ID NO: 1004 - DNA, 20 bp, synthetic construct
  source 1..20: mol_type = other DNA
tcccaaagggttaattagga

SEQ ID NO: 1005 - DNA, 20 bp, synthetic construct
  source 1..20: mol_type = other DNA
tcctcactctctcacccggc

SEQ ID NO: 1006 - DNA, 20 bp, synthetic construct
  source 1..20: mol_type = other DNA
cctcccgggtcctggttcaa

SEQ ID NO: 1007 - DNA, 20 bp, synthetic construct
  source 1..20: mol_type = other DNA
gctatggtggtttcaaatgt

SEQ ID NO: 1008 - DNA, 20 bp, synthetic construct
  source 1..20: mol_type = other DNA
ttatatatgtaaattatatc

SEQ ID NO: 1009 - DNA, 20 bp, synthetic construct
  source 1..20: mol_type = other DNA
gtcaattagaaataaaaaat

SEQ ID NO: 1010 - DNA, 20 bp, synthetic construct
  source 1..20: mol_type = other DNA
ctaaaacccacattattaac

SEQ ID NO: 1011 - DNA, 20 bp, synthetic construct
  source 1..20: mol_type = other DNA
catcctctacaaaagaaaga

SEQ ID NO: 1012 - DNA, 20 bp, synthetic construct
  source 1..20: mol_type = other DNA
tacaaaaatcaacacacaaa

SEQ ID NO: 1013 - DNA, 20 bp, synthetic construct
  source 1..20: mol_type = other DNA
aaaatcactttcaaaacaag

SEQ ID NO: 1014 - DNA, 20 bp, synthetic construct
  source 1..20: mol_type = other DNA
tggatactagttcagccaca

SEQ ID NO: 1015 - DNA, 20 bp, synthetic construct
  source 1..20: mol_type = other DNA
tcagacacttcacaataaaa

SEQ ID NO: 1016 - DNA, 20 bp, synthetic construct
  source 1..20: mol_type = other DNA
aaacctacctgagagaagga

SEQ ID NO: 1017 - DNA, 20 bp, synthetic construct
  source 1..20: mol_type = other DNA
aaaaattaacattaggcacc

SEQ ID NO: 1018 - DNA, 20 bp, synthetic construct
  source 1..20: mol_type = other DNA
gtttggcagttccatcacag

SEQ ID NO: 1019 - DNA, 20 bp, synthetic construct
  source 1..20: mol_type = other DNA
ttactaaaaaaaggttgaca

SEQ ID NO: 1020 - DNA, 20 bp, synthetic construct
  source 1..20: mol_type = other DNA
ttattgtaaaaagatttatc

SEQ ID NO: 1021 - DNA, 20 bp, synthetic construct
  source 1..20: mol_type = other DNA
taaaaactaacatataaaca

SEQ ID NO: 1022 - DNA, 20 bp, synthetic construct
  source 1..20: mol_type = other DNA
gtaaactctcaaatctttct

SEQ ID NO: 1023 - DNA, 20 bp, synthetic construct
  source 1..20: mol_type = other DNA
gcataagctgtgggttacag

SEQ ID NO: 1024 - DNA, 20 bp, synthetic construct
  source 1..20: mol_type = other DNA
gtatttggttcctttgagaa

SEQ ID NO: 1025 - DNA, 20 bp, synthetic construct
  source 1..20: mol_type = other DNA
cttagtatttcatcaatcct

SEQ ID NO: 1026 - DNA, 20 bp, synthetic construct
  source 1..20: mol_type = other DNA
agtgttccttgacataaata

SEQ ID NO: 1027 - DNA, 20 bp, synthetic construct
  source 1..20: mol_type = other DNA
acaggccctccatcatcatc

SEQ ID NO: 1028 - DNA, 20 bp, synthetic construct
  source 1..20: mol_type = other DNA
ctctacatatgatattaaaa

SEQ ID NO: 1029 - DNA, 20 bp, synthetic construct
  source 1..20: mol_type = other DNA
agcagatatatggataacca

SEQ ID NO: 1030 - DNA, 20 bp, synthetic construct
  source 1..20: mol_type = other DNA
catgtcaactgtgttccttt

SEQ ID NO: 1031 - DNA, 20 bp, synthetic construct
  source 1..20: mol_type = other DNA
tcaagtttagtaaaagggcg

SEQ ID NO: 1032 - DNA, 20 bp, synthetic construct
  source 1..20: mol_type = other DNA
cggaggtgcggatagggact

SEQ ID NO: 1033 - DNA, 20 bp, synthetic construct
  source 1..20: mol_type = other DNA
ggccgcgccaccgccgcccc

SEQ ID NO: 1034 - DNA, 20 bp, synthetic construct
  source 1..20: mol_type = other DNA
tacttcacatttggagccaa

SEQ ID NO: 1035 - DNA, 20 bp, synthetic construct
  source 1..20: mol_type = other DNA
tggtttgcccttgcttcccg

SEQ ID NO: 1036 - DNA, 20 bp, synthetic construct
  source 1..20: mol_type = other DNA
atgacttctctatttctttg

SEQ ID NO: 1037 - DNA, 20 bp, synthetic construct
  source 1..20: mol_type = other DNA
ctttagcctcactagaaggg

SEQ ID NO: 1038 - DNA, 20 bp, synthetic construct
  source 1..20: mol_type = other DNA
tccgtgttactaagtattga

SEQ ID NO: 1039 - DNA, 20 bp, synthetic construct
  source 1..20: mol_type = other DNA
cttgttgtatggtaatttgg

SEQ ID NO: 1040 - DNA, 20 bp, synthetic construct
  source 1..20: mol_type = other DNA
tgaaattctagttttctgtg

SEQ ID NO: 1041 - DNA, 20 bp, synthetic construct
  source 1..20: mol_type = other DNA
tgaaacagcatatggaatta

SEQ ID NO: 1042 - DNA, 20 bp, synthetic construct
  source 1..20: mol_type = other DNA
ttattttatattatctacaa

SEQ ID NO: 1043 - DNA, 20 bp, synthetic construct
  source 1..20: mol_type = other DNA
agccttctgagagatagatc

SEQ ID NO: 1044 - DNA, 20 bp, synthetic construct
  source 1..20: mol_type = other DNA
gcccccgccgccgcctcgga

SEQ ID NO: 1045 - DNA, 20 bp, synthetic construct
  source 1..20: mol_type = other DNA
ctgccggcccccagcccacc

SEQ ID NO: 1046 - DNA, 20 bp, synthetic construct
  source 1..20: mol_type = other DNA
tggcaaaatcccgtcctcac

SEQ ID NO: 1047 - DNA, 20 bp, synthetic construct
  source 1..20: mol_type = other DNA
cactgtttcagaatgtggaa

SEQ ID NO: 1048 - DNA, 20 bp, synthetic construct
  source 1..20: mol_type = other DNA
gcatatagcaagagatgtag

SEQ ID NO: 1049 - DNA, 20 bp, synthetic construct
  source 1..20: mol_type = other DNA
attattaagaatattttaac

SEQ ID NO: 1050 - DNA, 20 bp, synthetic construct
  source 1..20: mol_type = other DNA
gcagagcaggactagtccat

SEQ ID NO: 1051 - DNA, 20 bp, synthetic construct
  source 1..20: mol_type = other DNA
gccttaatttcaatactttg

SEQ ID NO: 1052 - DNA, 20 bp, synthetic construct
  source 1..20: mol_type = other DNA
gcaagagtttcacttgagcc

SEQ ID NO: 1053 - DNA, 20 bp, synthetic construct
  source 1..20: mol_type = other DNA
cccatttcagcctccccatg

SEQ ID NO: 1054 - DNA, 20 bp, synthetic construct
  source 1..20: mol_type = other DNA
tactgctgaagtcttgttca

SEQ ID NO: 1055 - DNA, 20 bp, synthetic construct
  source 1..20: mol_type = other DNA
acttgaaatacgattagtat

SEQ ID NO: 1056 - DNA, 20 bp, synthetic construct
  source 1..20: mol_type = other DNA
ctcacttaggtgagtcattt

SEQ ID NO: 1057 - DNA, 20 bp, synthetic construct
  source 1..20: mol_type = other DNA
tgagatataacaatattgaa

SEQ ID NO: 1058 - DNA, 20 bp, synthetic construct
  source 1..20: mol_type = other DNA
aggaatcatgcctcatatga

SEQ ID NO: 1059 - DNA, 20 bp, synthetic construct
  source 1..20: mol_type = other DNA
gcagaaggaccacttaagac

SEQ ID NO: 1060 - DNA, 20 bp, synthetic construct
  source 1..20: mol_type = other DNA
aatacatataaaagcaatgc

SEQ ID NO: 1061 - DNA, 20 bp, synthetic construct
  source 1..20: mol_type = other DNA
tacctcgcctaacaaaaatt

SEQ ID NO: 1062 - DNA, 20 bp, synthetic construct
  source 1..20: mol_type = other DNA
accagagtccaggagtctga

SEQ ID NO: 1063 - DNA, 20 bp, synthetic construct
  source 1..20: mol_type = other DNA
agtctcaaaaatttgtgata

SEQ ID NO: 1064 - DNA, 20 bp, synthetic construct
  source 1..20: mol_type = other DNA
atcattcaaagtggctttaa

SEQ ID NO: 1065 - DNA, 20 bp, synthetic construct
  source 1..20: mol_type = other DNA
ttataacagaggaatatttc

SEQ ID NO: 1066 - DNA, 20 bp, synthetic construct
  source 1..20: mol_type = other DNA
atcctttaacaaccatggaa

SEQ ID NO: 1067 - DNA, 20 bp, synthetic construct
  source 1..20: mol_type = other DNA
ggtataaaagagcaaggaga

SEQ ID NO: 1068 - DNA, 20 bp, synthetic construct
  source 1..20: mol_type = other DNA
ccgtaaacagcttttctaat

SEQ ID NO: 1069 - DNA, 20 bp, synthetic construct
  source 1..20: mol_type = other DNA
acaagtgaggagggccacct

SEQ ID NO: 1070 - DNA, 20 bp, synthetic construct
  source 1..20: mol_type = other DNA
atctccctgcgctcagatga

SEQ ID NO: 1071 - DNA, 20 bp, synthetic construct
  source 1..20: mol_type = other DNA
taggattgtaaaatgataca

SEQ ID NO: 1072 - DNA, 20 bp, synthetic construct
  source 1..20: mol_type = other DNA
atggaacagaacttaggagg

SEQ ID NO: 1073 - DNA, 20 bp, synthetic construct
  source 1..20: mol_type = other DNA
atgtattatacagattatat

SEQ ID NO: 1074 - DNA, 20 bp, synthetic construct
  source 1..20: mol_type = other DNA
gggcagaaacttagtcattt

SEQ ID NO: 1075 - DNA, 20 bp, synthetic construct
  source 1..20: mol_type = other DNA
tcttaccaacacctcatctt

SEQ ID NO: 1076 - DNA, 20 bp, synthetic construct
  source 1..20: mol_type = other DNA
ttaatttagcaaatggaatc

SEQ ID NO: 1077 - DNA, 20 bp, synthetic construct
  source 1..20: mol_type = other DNA
aaattttgattagcattgcc

SEQ ID NO: 1078 - DNA, 20 bp, synthetic construct
  source 1..20: mol_type = other DNA
gttataaccaacatctatat

SEQ ID NO: 1079 - DNA, 20 bp, synthetic construct
  source 1..20: mol_type = other DNA
ctattatcttatcacaaaat

SEQ ID NO: 1080 - DNA, 20 bp, synthetic construct
  source 1..20: mol_type = other DNA
gttgctaaactgtaacatcc

SEQ ID NO: 1081 - DNA, 20 bp, synthetic construct
  source 1..20: mol_type = other DNA
ttcccaaagggttaattagg

SEQ ID NO: 1082 - DNA, 20 bp, synthetic construct
  source 1..20: mol_type = other DNA
gcctactggtgttaacacca

SEQ ID NO: 1083 - DNA, 20 bp, synthetic construct
  source 1..20: mol_type = other DNA
aatggagtctcactctatag

SEQ ID NO: 1084 - DNA, 20 bp, synthetic construct
  source 1..20: mol_type = other DNA
taagctgtgctatggtggtt

SEQ ID NO: 1085 - DNA, 20 bp, synthetic construct
  source 1..20: mol_type = other DNA
atttatatatgtaaattata

SEQ ID NO: 1086 - DNA, 20 bp, synthetic construct
  source 1..20: mol_type = other DNA
acttacacagtaaaaatggt

SEQ ID NO: 1087 - DNA, 20 bp, synthetic construct
  source 1..20: mol_type = other DNA
acactatgaagcaggttcta

SEQ ID NO: 1088 - DNA, 20 bp, synthetic construct
  source 1..20: mol_type = other DNA
taagtgatgaggtttttaag

SEQ ID NO: 1089 - DNA, 20 bp, synthetic construct
  source 1..20: mol_type = other DNA
acctattagaactgacaaac

SEQ ID NO: 1090 - DNA, 20 bp, synthetic construct
  source 1..20: mol_type = other DNA
gggttataaaatgttatttg

SEQ ID NO: 1091 - DNA, 20 bp, synthetic construct
  source 1..20: mol_type = other DNA
gcaatgtggatactagttca

SEQ ID NO: 1092 - DNA, 20 bp, synthetic construct
  source 1..20: mol_type = other DNA
tcctcttatacttgtcattt

SEQ ID NO: 1093 - DNA, 20 bp, synthetic construct
  source 1..20: mol_type = other DNA
aggactattactaataattt

SEQ ID NO: 1094 - DNA, 20 bp, synthetic construct
  source 1..20: mol_type = other DNA
cacaccaggcctccaattac

SEQ ID NO: 1095 - DNA, 20 bp, synthetic construct
  source 1..20: mol_type = other DNA
gggcacgatctcaaaacaat

SEQ ID NO: 1096 - DNA, 20 bp, synthetic construct
  source 1..20: mol_type = other DNA
tgcaaagacagggttttgtc

SEQ ID NO: 1097 - DNA, 20 bp, synthetic construct
  source 1..20: mol_type = other DNA
aaacaaatccaaattgcaag

SEQ ID NO: 1098 - DNA, 20 bp, synthetic construct
  source 1..20: mol_type = other DNA
tacaaaaatattagccagct

SEQ ID NO: 1099 - DNA, 20 bp, synthetic construct
  source 1..20: mol_type = other DNA
aaacagctgtaaactctcaa

SEQ ID NO: 1100 - DNA, 20 bp, synthetic construct
  source 1..20: mol_type = other DNA
aaactaaacacctttgatca

SEQ ID NO: 1101 - DNA, 20 bp, synthetic construct
  source 1..20: mol_type = other DNA
aaaaggtgacataaaattgt

SEQ ID NO: 1102 - DNA, 20 bp, synthetic construct
  source 1..20: mol_type = other DNA
agccatgcacaggactgaaa

SEQ ID NO: 1103 - DNA, 20 bp, synthetic construct
  source 1..20: mol_type = other DNA
ctttggtccagacctagtcc

SEQ ID NO: 1104 - DNA, 20 bp, synthetic construct
  source 1..20: mol_type = other DNA
aagacagtcctttttttcta

SEQ ID NO: 1105 - DNA, 20 bp, synthetic construct
  source 1..20: mol_type = other DNA
taatacagctctacatatga

SEQ ID NO: 1106 - DNA, 20 bp, synthetic construct
  source 1..20: mol_type = other DNA
aaagcagatatatggataac

SEQ ID NO: 1107 - DNA, 20 bp, synthetic construct
  source 1..20: mol_type = other DNA
acaggcaacatctccggctt

SEQ ID NO: 1108 - DNA, 20 bp, synthetic construct
  source 1..20: mol_type = other DNA
gggagcggaggtgcggatag

SEQ ID NO: 1109 - DNA, 20 bp, synthetic construct
  source 1..20: mol_type = other DNA
gcggagggatacggtcccgg

SEQ ID NO: 1110 - DNA, 20 bp, synthetic construct
  source 1..20: mol_type = other DNA
gtacttcacatttggagcca

SEQ ID NO: 1111 - DNA, 20 bp, synthetic construct
  source 1..20: mol_type = other DNA
actggtttgcccttgcttcc

SEQ ID NO: 1112 - DNA, 20 bp, synthetic construct
  source 1..20: mol_type = other DNA
atatgacttctctatttctt

SEQ ID NO: 1113 - DNA, 20 bp, synthetic construct
  source 1..20: mol_type = other DNA
gatgtttcattgggtttaat

SEQ ID NO: 1114 - DNA, 20 bp, synthetic construct
  source 1..20: mol_type = other DNA
ctccgtgttactaagtattg

SEQ ID NO: 1115 - DNA, 20 bp, synthetic construct
  source 1..20: mol_type = other DNA
ccttgttgtatggtaatttg

SEQ ID NO: 1116 - DNA, 20 bp, synthetic construct
  source 1..20: mol_type = other DNA
ataaatgaaattctagtttt

SEQ ID NO: 1117 - DNA, 20 bp, synthetic construct
  source 1..20: mol_type = other DNA
gactctgaaacagcatatgg

SEQ ID NO: 1118 - DNA, 20 bp, synthetic construct
  source 1..20: mol_type = other DNA
ctttgtcaagtttagtaaaa

SEQ ID NO: 1119 - DNA, 20 bp, synthetic construct
  source 1..20: mol_type = other DNA
agtttttattttatattatc

SEQ ID NO: 1120 - DNA, 20 bp, synthetic construct
  source 1..20: mol_type = other DNA
aaggtagccttctgagagat

SEQ ID NO: 1121 - DNA, 20 bp, synthetic construct
  source 1..20: mol_type = other DNA
cgggagcccccgccgccgcc

SEQ ID NO: 1122 - DNA, 20 bp, synthetic construct
  source 1..20: mol_type = other DNA
gtctcccccgcgctgccggc

SEQ ID NO: 1123 - DNA, 20 bp, synthetic construct
  source 1..20: mol_type = other DNA
acatggcaaaatcccgtcct

SEQ ID NO: 1124 - DNA, 20 bp, synthetic construct
  source 1..20: mol_type = other DNA
accatgactgatcccatgtt

SEQ ID NO: 1125 - DNA, 20 bp, synthetic construct
  source 1..20: mol_type = other DNA
ctgcatatagcaagagatgt

SEQ ID NO: 1126 - DNA, 20 bp, synthetic construct
  source 1..20: mol_type = other DNA
aattataatcaagattaatt

SEQ ID NO: 1127 - DNA, 20 bp, synthetic construct
  source 1..20: mol_type = other DNA
aaaaattcattgaactgttg

SEQ ID NO: 1128 - DNA, 20 bp, synthetic construct
  source 1..20: mol_type = other DNA
ctactatgtgccaagaacag

SEQ ID NO: 1129 - DNA, 20 bp, synthetic construct
  source 1..20: mol_type = other DNA
gcctgtaatccctcccaaca

SEQ ID NO: 1130 - DNA, 20 bp, synthetic construct
  source 1..20: mol_type = other DNA
tgtttccctccctttttaat

SEQ ID NO: 1131 - DNA, 20 bp, synthetic construct
  source 1..20: mol_type = other DNA
aacagcaaaaggtaggctag

SEQ ID NO: 1132 - DNA, 20 bp, synthetic construct
  source 1..20: mol_type = other DNA
tatgtcatgctgtccaatat

SEQ ID NO: 1133 - DNA, 20 bp, synthetic construct
  source 1..20: mol_type = other DNA
taaggttaactcacttaggt

SEQ ID NO: 1134 - DNA, 20 bp, synthetic construct
  source 1..20: mol_type = other DNA
tgcctctctattccctgaga

SEQ ID NO: 1135 - DNA, 20 bp, synthetic construct
  source 1..20: mol_type = other DNA
aaggcacattgtgtggccaa

SEQ ID NO: 1136 - DNA, 20 bp, synthetic construct
  source 1..20: mol_type = other DNA
cccggcctcgagactccacc

SEQ ID NO: 1137 - DNA, 20 bp, synthetic construct
  source 1..20: mol_type = other DNA
taggaggagaacttatgaat

SEQ ID NO: 1138 - DNA, 20 bp, synthetic construct
  source 1..20: mol_type = other DNA
agctggtatttaaaccaggt

SEQ ID NO: 1139 - DNA, 20 bp, synthetic construct
  source 1..20: mol_type = other DNA
tgaggcaggatcaccagagt

SEQ ID NO: 1140 - DNA, 20 bp, synthetic construct
  source 1..20: mol_type = other DNA
caaccacactactccatatt

SEQ ID NO: 1141 - DNA, 20 bp, synthetic construct
  source 1..20: mol_type = other DNA
taaaataatcagtatttgaa

SEQ ID NO: 1142 - DNA, 20 bp, synthetic construct
  source 1..20: mol_type = other DNA
atttttgaatttataacaga

SEQ ID NO: 1143 - DNA, 20 bp, synthetic construct
  source 1..20: mol_type = other DNA
aggtttccctggctgggcgc

SEQ ID NO: 1144 - DNA, 20 bp, synthetic construct
  source 1..20: mol_type = other DNA
ggacctggcagttagaggtt

SEQ ID NO: 1145 - DNA, 20 bp, synthetic construct
  source 1..20: mol_type = other DNA
ctggcctcaataagtgccac

SEQ ID NO: 1146 - DNA, 20 bp, synthetic construct
  source 1..20: mol_type = other DNA
aaatcattacaagtgaggag

SEQ ID NO: 1147 - DNA, 20 bp, synthetic construct
  source 1..20: mol_type = other DNA
tctcacttggctcactgcag

SEQ ID NO: 1148 - DNA, 20 bp, synthetic construct
  source 1..20: mol_type = other DNA
tgtaaaatgatacagctacg

SEQ ID NO: 1149 - DNA, 20 bp, synthetic construct
  source 1..20: mol_type = other DNA
agaagtgtaaagtttatagc

SEQ ID NO: 1150 - DNA, 20 bp, synthetic construct
  source 1..20: mol_type = other DNA
tatactactacaccatgtat

SEQ ID NO: 1151 - DNA, 20 bp, synthetic construct
  source 1..20: mol_type = other DNA
tgaattttggaaaatctctc

SEQ ID NO: 1152 - DNA, 20 bp, synthetic construct
  source 1..20: mol_type = other DNA
agaccaatgcactataataa

SEQ ID NO: 1153 - DNA, 20 bp, synthetic construct
  source 1..20: mol_type = other DNA
tcattcagttataaccaaca

SEQ ID NO: 1154 - DNA, 20 bp, synthetic construct
  source 1..20: mol_type = other DNA
ataaactcttctcccaactc

SEQ ID NO: 1155 - DNA, 20 bp, synthetic construct
  source 1..20: mol_type = other DNA
aaagatccacaacctacaag

SEQ ID NO: 1156 - DNA, 20 bp, synthetic construct
  source 1..20: mol_type = other DNA
gttcccaaagggttaattag

SEQ ID NO: 1157 - DNA, 20 bp, synthetic construct
  source 1..20: mol_type = other DNA
ctgccatgccactagtgact

SEQ ID NO: 1158 - DNA, 20 bp, synthetic construct
  source 1..20: mol_type = other DNA
gaagcagatttttttttttt

SEQ ID NO: 1159 - DNA, 20 bp, synthetic construct
  source 1..20: mol_type = other DNA
tcactgaacaaagtacaaat

SEQ ID NO: 1160 - DNA, 20 bp, synthetic construct
  source 1..20: mol_type = other DNA
aaccactgatttatacactt

SEQ ID NO: 1161 - DNA, 20 bp, synthetic construct
  source 1..20: mol_type = other DNA
tgcctggccaagaatagtct

SEQ ID NO: 1162 - DNA, 20 bp, synthetic construct
  source 1..20: mol_type = other DNA
gaacatgtattgaatacata

SEQ ID NO: 1163 - DNA, 20 bp, synthetic construct
  source 1..20: mol_type = other DNA
cagaagacaaagatattagc

SEQ ID NO: 1164 - DNA, 20 bp, synthetic construct
  source 1..20: mol_type = other DNA
atattatttatactgtgtat

SEQ ID NO: 1165 - DNA, 20 bp, synthetic construct
  source 1..20: mol_type = other DNA
gttttctctttgcttgcttg

SEQ ID NO: 1166 - DNA, 20 bp, synthetic construct
  source 1..20: mol_type = other DNA
tcttgcaatgtggatactag

SEQ ID NO: 1167 - DNA, 20 bp, synthetic construct
  source 1..20: mol_type = other DNA
tttctatcctcttatacttg

SEQ ID NO: 1168 - DNA, 20 bp, synthetic construct
  source 1..20: mol_type = other DNA
cacactaaaacaaaattcag

SEQ ID NO: 1169 - DNA, 20 bp, synthetic construct
  source 1..20: mol_type = other DNA
gctctcgaactcatgggttc

SEQ ID NO: 1170 - DNA, 20 bp, synthetic construct
  source 1..20: mol_type = other DNA
agcctgggaagcacggagaa

SEQ ID NO: 1171 - DNA, 20 bp, synthetic construct
  source 1..20: mol_type = other DNA
atcacccctccatcgccctc

SEQ ID NO: 1172 - DNA, 20 bp, synthetic construct
  source 1..20: mol_type = other DNA
taggtgacagagccaagatt

SEQ ID NO: 1173 - DNA, 20 bp, synthetic construct
  source 1..20: mol_type = other DNA
tgttacttattaccttcctg

SEQ ID NO: 1174 - DNA, 20 bp, synthetic construct
  source 1..20: mol_type = other DNA
tggtttccagatttccagaa

SEQ ID NO: 1175 - DNA, 20 bp, synthetic construct
  source 1..20: mol_type = other DNA
cacaattttttatttaaaat

SEQ ID NO: 1176 - DNA, 20 bp, synthetic construct
  source 1..20: mol_type = other DNA
tgaatgagaaaaggtgacat

SEQ ID NO: 1177 - DNA, 20 bp, synthetic construct
  source 1..20: mol_type = other DNA
gccagcatgcatggctgatt

SEQ ID NO: 1178 - DNA, 20 bp, synthetic construct
  source 1..20: mol_type = other DNA
tcaaagacatatgcttcttt

SEQ ID NO: 1179 - DNA, 20 bp, synthetic construct
  source 1..20: mol_type = other DNA
cttcctgagcttcacagtcc

SEQ ID NO: 1180 - DNA, 20 bp, synthetic construct
  source 1..20: mol_type = other DNA
atttaaaccatccattgtct

SEQ ID NO: 1181 - DNA, 20 bp, synthetic construct
  source 1..20: mol_type = other DNA
acaacttatggtcaaagcag

SEQ ID NO: 1182 - DNA, 20 bp, synthetic construct
  source 1..20: mol_type = other DNA
agagctcttttacgcataca

SEQ ID NO: 1183 - DNA, 20 bp, synthetic construct
  source 1..20: mol_type = other DNA
ctgagcgcatcggagggcgg

SEQ ID NO: 1184 - DNA, 20 bp, synthetic construct
  source 1..20: mol_type = other DNA
aggcgagctctgccgggagg

SEQ ID NO: 1185 - DNA, 20 bp, synthetic construct
  source 1..20: mol_type = other DNA
tgtacttcacatttggagcc

SEQ ID NO: 1186 - DNA, 20 bp, synthetic construct
  source 1..20: mol_type = other DNA
taactggtttgcccttgctt

SEQ ID NO: 1187 - DNA, 20 bp, synthetic construct
  source 1..20: mol_type = other DNA
aattcgggttgaaatctgaa

SEQ ID NO: 1188 - DNA, 20 bp, synthetic construct
  source 1..20: mol_type = other DNA
gtgatgtttcattgggttta

SEQ ID NO: 1189 - DNA, 20 bp, synthetic construct
  source 1..20: mol_type = other DNA
tgctccgtgttactaagtat

SEQ ID NO: 1190 - DNA, 20 bp, synthetic construct
  source 1..20: mol_type = other DNA
tccttgttgtatggtaattt

SEQ ID NO: 1191 - DNA, 20 bp, synthetic construct
  source 1..20: mol_type = other DNA
acaaaataaatgaaattcta

SEQ ID NO: 1192 - DNA, 20 bp, synthetic construct
  source 1..20: mol_type = other DNA
tgaaactttgtcaagtttag

SEQ ID NO: 1193 - DNA, 20 bp, synthetic construct
  source 1..20: mol_type = other DNA
ttttaagtttttattttata

SEQ ID NO: 1194 - DNA, 20 bp, synthetic construct
  source 1..20: mol_type = other DNA
gagttcgggagcccccgccg

SEQ ID NO: 1195 - DNA, 20 bp, synthetic construct
  source 1..20: mol_type = other DNA
cgagcgagtctcccccgcgc

SEQ ID NO: 1196 - DNA, 20 bp, synthetic construct
  source 1..20: mol_type = other DNA
aaaagcaaaaataagaatta

SEQ ID NO: 1197 - DNA, 20 bp, synthetic construct
  source 1..20: mol_type = other DNA
gaacaccatgactgatccca

SEQ ID NO: 1198 - DNA, 20 bp, synthetic construct
  source 1..20: mol_type = other DNA
tagcacctgagccccacctg

SEQ ID NO: 1199 - DNA, 20 bp, synthetic construct
  source 1..20: mol_type = other DNA
cttcaattcctgatttcgaa

SEQ ID NO: 1200 - DNA, 20 bp, synthetic construct
  source 1..20: mol_type = other DNA
aaaaaaaatttttggctagg

SEQ ID NO: 1201 - DNA, 20 bp, synthetic construct
  source 1..20: mol_type = other DNA
tttcaagtctatcaacagat

SEQ ID NO: 1202 - DNA, 20 bp, synthetic construct
  source 1..20: mol_type = other DNA
aatgggaagaaagaggaggc

SEQ ID NO: 1203 - DNA, 20 bp, synthetic construct
  source 1..20: mol_type = other DNA
gaggacaggataacagatta

SEQ ID NO: 1204 - DNA, 20 bp, synthetic construct
  source 1..20: mol_type = other DNA
gagttgaagtctaacagcaa

SEQ ID NO: 1205 - DNA, 20 bp, synthetic construct
  source 1..20: mol_type = other DNA
actttgtacaatgatgaaga

SEQ ID NO: 1206 - DNA, 20 bp, synthetic construct
  source 1..20: mol_type = other DNA
gttccacctcttaaggttaa

SEQ ID NO: 1207 - DNA, 20 bp, synthetic construct
  source 1..20: mol_type = other DNA
ttatagtaatctgtaatcag

SEQ ID NO: 1208 - DNA, 20 bp, synthetic construct
  source 1..20: mol_type = other DNA
atagatatagcccccaaagg

SEQ ID NO: 1209 - DNA, 20 bp, synthetic construct
  source 1..20: mol_type = other DNA
gcaagactccgtctttctgt

SEQ ID NO: 1210 - DNA, 20 bp, synthetic construct
  source 1..20: mol_type = other DNA
aaacatcataggaggagaac

SEQ ID NO: 1211 - DNA, 20 bp, synthetic construct
  source 1..20: mol_type = other DNA
ctcagcagtcaagtatcttg

SEQ ID NO: 1212 - DNA, 20 bp, synthetic construct
  source 1..20: mol_type = other DNA
agaaggaagcaaactagaaa

SEQ ID NO: 1213 - DNA, 20 bp, synthetic construct
  source 1..20: mol_type = other DNA
caggtcataccttcatagaa

SEQ ID NO: 1214 - DNA, 20 bp, synthetic construct
  source 1..20: mol_type = other DNA
aaaccagtctataaaataat

SEQ ID NO: 1215 - DNA, 20 bp, synthetic construct
  source 1..20: mol_type = other DNA
ttcaactaaaattttatctt

SEQ ID NO: 1216 - DNA, 20 bp, synthetic construct
  source 1..20: mol_type = other DNA
actccgcctcaaaataaagg

SEQ ID NO: 1217 - DNA, 20 bp, synthetic construct
  source 1..20: mol_type = other DNA
aaaggacctggcagttagag

SEQ ID NO: 1218 - DNA, 20 bp, synthetic construct
  source 1..20: mol_type = other DNA
taataaacatgtaatgcttt

SEQ ID NO: 1219 - DNA, 20 bp, synthetic construct
  source 1..20: mol_type = other DNA
tttcttaaatcattacaagt

SEQ ID NO: 1220 - DNA, 20 bp, synthetic construct
  source 1..20: mol_type = other DNA
gaaaccagggtctcacttgg

SEQ ID NO: 1221 - DNA, 20 bp, synthetic construct
  source 1..20: mol_type = other DNA
ggtgaggatgtgaaaaacat

SEQ ID NO: 1222 - DNA, 20 bp, synthetic construct
  source 1..20: mol_type = other DNA
gattaggagtagacagagtt

SEQ ID NO: 1223 - DNA, 20 bp, synthetic construct
  source 1..20: mol_type = other DNA
tgtataaacattttctgaat

SEQ ID NO: 1224 - DNA, 20 bp, synthetic construct
  source 1..20: mol_type = other DNA
gctacccccacagcagtggg

SEQ ID NO: 1225 - DNA, 20 bp, synthetic construct
  source 1..20: mol_type = other DNA
tagaaatggctgaattttgg

SEQ ID NO: 1226 - DNA, 20 bp, synthetic construct
  source 1..20: mol_type = other DNA
gtcatactgaccagagtcta

SEQ ID NO: 1227 - DNA, 20 bp, synthetic construct
  source 1..20: mol_type = other DNA
atgtcaaagtagttgttccc

SEQ ID NO: 1228 - DNA, 20 bp, synthetic construct
  source 1..20: mol_type = other DNA
tgctgcacctgacacagatc

SEQ ID NO: 1229 - DNA, 20 bp, synthetic construct
  source 1..20: mol_type = other DNA
gaaaagatccacaacctaca

SEQ ID NO: 1230 - DNA, 20 bp, synthetic construct
  source 1..20: mol_type = other DNA
aattcacattttactttaac

SEQ ID NO: 1231 - DNA, 20 bp, synthetic construct
  source 1..20: mol_type = other DNA
acagaatagctgaagcagat

SEQ ID NO: 1232 - DNA, 20 bp, synthetic construct
  source 1..20: mol_type = other DNA
gcttcactgaacaaagtaca

SEQ ID NO: 1233 - DNA, 20 bp, synthetic construct
  source 1..20: mol_type = other DNA
ttgatttatatatgtaaatt

SEQ ID NO: 1234 - DNA, 20 bp, synthetic construct
  source 1..20: mol_type = other DNA
gacatgcggtttcaccattt

SEQ ID NO: 1235 - DNA, 20 bp, synthetic construct
  source 1..20: mol_type = other DNA
aatactgggtcatctatatt

SEQ ID NO: 1236 - DNA, 20 bp, synthetic construct
  source 1..20: mol_type = other DNA
acctttaaagtagactgcaa

SEQ ID NO: 1237 - DNA, 20 bp, synthetic construct
  source 1..20: mol_type = other DNA
tatatatattatttatactg

SEQ ID NO: 1238 - DNA, 20 bp, synthetic construct
  source 1..20: mol_type = other DNA
actacagttttttaagacat

SEQ ID NO: 1239 - DNA, 20 bp, synthetic construct
  source 1..20: mol_type = other DNA
gagtgcttgtgccagccttc

SEQ ID NO: 1240 - DNA, 20 bp, synthetic construct
  source 1..20: mol_type = other DNA
tgggtgagaaaaatatgaaa

SEQ ID NO: 1241 - DNA, 20 bp, synthetic construct
  source 1..20: mol_type = other DNA
gttcagcacactaaaacaaa

SEQ ID NO: 1242 - DNA, 20 bp, synthetic construct
  source 1..20: mol_type = other DNA
cactatattgcccatgctgc

SEQ ID NO: 1243 - DNA, 20 bp, synthetic construct
  source 1..20: mol_type = other DNA
acctatagtcagggcatggt

SEQ ID NO: 1244 - DNA, 20 bp, synthetic construct
  source 1..20: mol_type = other DNA
ctcactgcaacctcgatcac

SEQ ID NO: 1245 - DNA, 20 bp, synthetic construct
  source 1..20: mol_type = other DNA
aaaatacaaggccgggcgca

SEQ ID NO: 1246 - DNA, 20 bp, synthetic construct
  source 1..20: mol_type = other DNA
acttttatcaaatgaaagtt

SEQ ID NO: 1247 - DNA, 20 bp, synthetic construct
  source 1..20: mol_type = other DNA
catgaggatgctgtgttcaa

SEQ ID NO: 1248 - DNA, 20 bp, synthetic construct
  source 1..20: mol_type = other DNA
tacggatgggcctcttgaaa

SEQ ID NO: 1249 - DNA, 20 bp, synthetic construct
  source 1..20: mol_type = other DNA
catactaaaaatttaaaaac

SEQ ID NO: 1250 - DNA, 20 bp, synthetic construct
  source 1..20: mol_type = other DNA
ttaagctcaagatatcctga

SEQ ID NO: 1251 - DNA, 20 bp, synthetic construct
  source 1..20: mol_type = other DNA
cattctggctaaagatccca

SEQ ID NO: 1252 - DNA, 20 bp, synthetic construct
  source 1..20: mol_type = other DNA
tgaactttcttgatggttac

SEQ ID NO: 1253 - DNA, 20 bp, synthetic construct
  source 1..20: mol_type = other DNA
tgctcttaaagaaaaatggg

SEQ ID NO: 1254 - DNA, 20 bp, synthetic construct
  source 1..20: mol_type = other DNA
cagagagctcttttacgcat

SEQ ID NO: 1255 - DNA, 20 bp, synthetic construct
  source 1..20: mol_type = other DNA
ctgctaactggtttgccctt

SEQ ID NO: 1256 - DNA, 20 bp, synthetic construct
  source 1..20: mol_type = other DNA
ggccgctgagcgcatcggag

SEQ ID NO: 1257 - DNA, 20 bp, synthetic construct
  source 1..20: mol_type = other DNA
gagggaggcgagctctgccg

SEQ ID NO: 1258 - DNA, 20 bp, synthetic construct
  source 1..20: mol_type = other DNA
cttgtacttcacatttggag

SEQ ID NO: 1259 - DNA, 20 bp, synthetic construct
  source 1..20: mol_type = other DNA
agaattcgggttgaaatctg

SEQ ID NO: 1260 - DNA, 20 bp, synthetic construct
  source 1..20: mol_type = other DNA
ggtgatgtttcattgggttt

SEQ ID NO: 1261 - DNA, 20 bp, synthetic construct
  source 1..20: mol_type = other DNA
gtgctccgtgttactaagta

SEQ ID NO: 1262 - DNA, 20 bp, synthetic construct
  source 1..20: mol_type = other DNA
tctccttgttgtatggtaat

SEQ ID NO: 1263 - DNA, 20 bp, synthetic construct
  source 1..20: mol_type = other DNA
taaaaacaaaataaatgaaa

SEQ ID NO: 1264 - DNA, 20 bp, synthetic construct
  source 1..20: mol_type = other DNA
gtacctgcgggactctgaaa

SEQ ID NO: 1265 - DNA, 20 bp, synthetic construct
  source 1..20: mol_type = other DNA
tttactgaaactttgtcaag

SEQ ID NO: 1266 - DNA, 20 bp, synthetic construct
  source 1..20: mol_type = other DNA
attttttttaagtttttatt

SEQ ID NO: 1267 - DNA, 20 bp, synthetic construct
  source 1..20: mol_type = other DNA
ggagccccacgatttcaggg

SEQ ID NO: 1268 - DNA, 20 bp, synthetic construct
  source 1..20: mol_type = other DNA
ctgcgcccaccggccgagcc

SEQ ID NO: 1269 - DNA, 20 bp, synthetic construct
  source 1..20: mol_type = other DNA
aaaaatgttcactgcaccac

SEQ ID NO: 1270 - DNA, 20 bp, synthetic construct
  source 1..20: mol_type = other DNA
aaaggaacaccatgactgat

SEQ ID NO: 1271 - DNA, 20 bp, synthetic construct
  source 1..20: mol_type = other DNA
gaaccagactgcacaacagg

SEQ ID NO: 1272 - DNA, 20 bp, synthetic construct
  source 1..20: mol_type = other DNA
gctaaagcaggaggacagtt

SEQ ID NO: 1273 - DNA, 20 bp, synthetic construct
  source 1..20: mol_type = other DNA
atatcaataaaaaattactt

SEQ ID NO: 1274 - DNA, 20 bp, synthetic construct
  source 1..20: mol_type = other DNA
atcattacgaccattctgct

SEQ ID NO: 1275 - DNA, 20 bp, synthetic construct
  source 1..20: mol_type = other DNA
aggagcgcgccaccgtgcct

SEQ ID NO: 1276 - DNA, 20 bp, synthetic construct
  source 1..20: mol_type = other DNA
gaatttgaataggtcattta

SEQ ID NO: 1277 - DNA, 20 bp, synthetic construct
  source 1..20: mol_type = other DNA
ctgagatcaggagaccagcc

SEQ ID NO: 1278 - DNA, 20 bp, synthetic construct
  source 1..20: mol_type = other DNA
cctagacacaccaaaaaatc

SEQ ID NO: 1279 - DNA, 20 bp, synthetic construct
  source 1..20: mol_type = other DNA
atcagttagacaattaacta

SEQ ID NO: 1280 - DNA, 20 bp, synthetic construct
  source 1..20: mol_type = other DNA
tgctctctttgcgcctgtgt

SEQ ID NO: 1281 - DNA, 20 bp, synthetic construct
  source 1..20: mol_type = other DNA
tgtcatatacccactactca

SEQ ID NO: 1282 - DNA, 20 bp, synthetic construct
  source 1..20: mol_type = other DNA
cataaaattaaaatactaca

SEQ ID NO: 1283 - DNA, 20 bp, synthetic construct
  source 1..20: mol_type = other DNA
accacgcccggccaaagatg

SEQ ID NO: 1284 - DNA, 20 bp, synthetic construct
  source 1..20: mol_type = other DNA
aggaaactgaacctcagcag

SEQ ID NO: 1285 - DNA, 20 bp, synthetic construct
  source 1..20: mol_type = other DNA
cactgcttgcctggagaccc

SEQ ID NO: 1286 - DNA, 20 bp, synthetic construct
  source 1..20: mol_type = other DNA
gaaatgtaccctaagaaggg

SEQ ID NO: 1287 - DNA, 20 bp, synthetic construct
  source 1..20: mol_type = other DNA
tcttaagtacattaataata

SEQ ID NO: 1288 - DNA, 20 bp, synthetic construct
  source 1..20: mol_type = other DNA
cagagtgctatgtattaaat

SEQ ID NO: 1289 - DNA, 20 bp, synthetic construct
  source 1..20: mol_type = other DNA
gaacttaaaagtcacactga

SEQ ID NO: 1290 - DNA, 20 bp, synthetic construct
  source 1..20: mol_type = other DNA
aagtgcagcaataaagacag

SEQ ID NO: 1291 - DNA, 20 bp, synthetic construct
  source 1..20: mol_type = other DNA
atttctatatactctaaaaa

SEQ ID NO: 1292 - DNA, 20 bp, synthetic construct
  source 1..20: mol_type = other DNA
caataaaataaaaataaact

SEQ ID NO: 1293 - DNA, 20 bp, synthetic construct
  source 1..20: mol_type = other DNA
tagtaacctttttttttttg

SEQ ID NO: 1294 - DNA, 20 bp, synthetic construct
  source 1..20: mol_type = other DNA
gggtataatcaaagagacag

SEQ ID NO: 1295 - DNA, 20 bp, synthetic construct
  source 1..20: mol_type = other DNA
tacattcctaactaatcagc

SEQ ID NO: 1296 - DNA, 20 bp, synthetic construct
  source 1..20: mol_type = other DNA
aaaaacaaaaaaatgtgtat

SEQ ID NO: 1297 - DNA, 20 bp, synthetic construct
  source 1..20: mol_type = other DNA
tccagcccctgtatcccacc

SEQ ID NO: 1298 - DNA, 20 bp, synthetic construct
  source 1..20: mol_type = other DNA
ggaataaaagcattaatcca

SEQ ID NO: 1299 - DNA, 20 bp, synthetic construct
  source 1..20: mol_type = other DNA
caacaaaagcacatttaaat

SEQ ID NO: 1300 - DNA, 20 bp, synthetic construct
  source 1..20: mol_type = other DNA
tctgcagaaaaagaaaaaaa

SEQ ID NO: 1301 - DNA, 20 bp, synthetic construct
  source 1..20: mol_type = other DNA
atgaagcttgtttttcaaaa

SEQ ID NO: 1302 - DNA, 20 bp, synthetic construct
  source 1..20: mol_type = other DNA
ccaacagggtgctctttagc

SEQ ID NO: 1303 - DNA, 20 bp, synthetic construct
  source 1..20: mol_type = other DNA
aagttagtaacatactattg

SEQ ID NO: 1304 - DNA, 20 bp, synthetic construct
  source 1..20: mol_type = other DNA
aacttaactgacataaattc

SEQ ID NO: 1305 - DNA, 20 bp, synthetic construct
  source 1..20: mol_type = other DNA
acaccccgataccactaaaa

SEQ ID NO: 1306 - DNA, 20 bp, synthetic construct
  source 1..20: mol_type = other DNA
agaccatctaagtaatgtca

SEQ ID NO: 1307 - DNA, 20 bp, synthetic construct
  source 1..20: mol_type = other DNA
cttgctctactaatatctag

SEQ ID NO: 1308 - DNA, 20 bp, synthetic construct
  source 1..20: mol_type = other DNA
actttaaatggttgatttat

SEQ ID NO: 1309 - DNA, 20 bp, synthetic construct
  source 1..20: mol_type = other DNA
atgtgaagataattcaatgg

SEQ ID NO: 1310 - DNA, 20 bp, synthetic construct
  source 1..20: mol_type = other DNA
agcagaaaactgaaattctt

SEQ ID NO: 1311 - DNA, 20 bp, synthetic construct
  source 1..20: mol_type = other DNA
aattttaaaggccgggcacg

SEQ ID NO: 1312 - DNA, 20 bp, synthetic construct
  source 1..20: mol_type = other DNA
cgaattcagtaacacattaa

SEQ ID NO: 1313 - DNA, 20 bp, synthetic construct
  source 1..20: mol_type = other DNA
aagaactacaattttttttt

SEQ ID NO: 1314 - DNA, 20 bp, synthetic construct
  source 1..20: mol_type = other DNA
tcatagtcagtggacttggg

SEQ ID NO: 1315 - DNA, 20 bp, synthetic construct
  source 1..20: mol_type = other DNA
ccacatgtcagaaattgtgc

SEQ ID NO: 1316 - DNA, 20 bp, synthetic construct
  source 1..20: mol_type = other DNA
atggccatgtaaaaaaaaga

SEQ ID NO: 1317 - DNA, 20 bp, synthetic construct
  source 1..20: mol_type = other DNA
gtaggtatatataaagcaag

SEQ ID NO: 1318 - DNA, 20 bp, synthetic construct
  source 1..20: mol_type = other DNA
aagcaagtaaaaagataacc

SEQ ID NO: 1319 - DNA, 20 bp, synthetic construct
  source 1..20: mol_type = other DNA
tcacagtaagaaaagaaaca

SEQ ID NO: 1320 - DNA, 20 bp, synthetic construct
  source 1..20: mol_type = other DNA
gacaagacaagaaaagaaaa

SEQ ID NO: 1321 - DNA, 20 bp, synthetic construct
  source 1..20: mol_type = other DNA
taaacaaaaaagccactgaa

SEQ ID NO: 1322 - DNA, 20 bp, synthetic construct
  source 1..20: mol_type = other DNA
tagacatgaggatgctgtgt

SEQ ID NO: 1323 - DNA, 20 bp, synthetic construct
  source 1..20: mol_type = other DNA
aactaaagacaagtcaaatg

SEQ ID NO: 1324 - DNA, 20 bp, synthetic construct
  source 1..20: mol_type = other DNA
taatgttagcatatgtgtat

SEQ ID NO: 1325 - DNA, 20 bp, synthetic construct
  source 1..20: mol_type = other DNA
ctatttctgtactttttgcc

SEQ ID NO: 1326 - DNA, 20 bp, synthetic construct
  source 1..20: mol_type = other DNA
ttttgttatatatgctcatt

SEQ ID NO: 1327 - DNA, 20 bp, synthetic construct
  source 1..20: mol_type = other DNA
tgccagaatattttaacaag

SEQ ID NO: 1328 - DNA, 20 bp, synthetic construct
  source 1..20: mol_type = other DNA
agtttcacagtgttcgccag

SEQ ID NO: 1329 - DNA, 20 bp, synthetic construct
  source 1..20: mol_type = other DNA
acactggaggtgagctccaa

SEQ ID NO: 1330 - DNA, 20 bp, synthetic construct
  source 1..20: mol_type = other DNA
cctgcacacacacgcctcac

SEQ ID NO: 1331 - DNA, 20 bp, synthetic construct
  source 1..20: mol_type = other DNA
gctgcggccgctgagcgcat

SEQ ID NO: 1332 - DNA, 20 bp, synthetic construct
  source 1..20: mol_type = other DNA
aggcggagggaggcgagctc

SEQ ID NO: 1333 - DNA, 20 bp, synthetic construct
  source 1..20: mol_type = other DNA
acttgtacttcacatttgga

SEQ ID NO: 1334 - DNA, 20 bp, synthetic construct
  source 1..20: mol_type = other DNA
catcattttccagggccact

SEQ ID NO: 1335 - DNA, 20 bp, synthetic construct
  source 1..20: mol_type = other DNA
ccagaattcgggttgaaatc

SEQ ID NO: 1336 - DNA, 20 bp, synthetic construct
  source 1..20: mol_type = other DNA
aggtgatgtttcattgggtt

SEQ ID NO: 1337 - DNA, 20 bp, synthetic construct
  source 1..20: mol_type = other DNA
tgtgctccgtgttactaagt

SEQ ID NO: 1338 - DNA, 20 bp, synthetic construct
  source 1..20: mol_type = other DNA
tgtctccttgttgtatggta

SEQ ID NO: 1339 - DNA, 20 bp, synthetic construct
  source 1..20: mol_type = other DNA
tattttaaaaacaaaataaa

SEQ ID NO: 1340 - DNA, 20 bp, synthetic construct
  source 1..20: mol_type = other DNA
tttcggcaagcagagctggg

SEQ ID NO: 1341 - DNA, 20 bp, synthetic construct
  source 1..20: mol_type = other DNA
aagaatttactgaaactttg

SEQ ID NO: 1342 - DNA, 20 bp, synthetic construct
  source 1..20: mol_type = other DNA
tttaaattttttttaagttt

SEQ ID NO: 1343 - DNA, 20 bp, synthetic construct
  source 1..20: mol_type = other DNA
cacatggagccccacgattt

SEQ ID NO: 1344 - DNA, 20 bp, synthetic construct
  source 1..20: mol_type = other DNA
tgctgcgggaggctggacag

SEQ ID NO: 1345 - DNA, 20 bp, synthetic construct
  source 1..20: mol_type = other DNA
aataattacactgaagcaaa

SEQ ID NO: 1346 - DNA, 20 bp, synthetic construct
  source 1..20: mol_type = other DNA
tcctttaagtcaaaatatat

SEQ ID NO: 1347 - DNA, 20 bp, synthetic construct
  source 1..20: mol_type = other DNA
aaaaaaaacaggcctgttag

SEQ ID NO: 1348 - DNA, 20 bp, synthetic construct
  source 1..20: mol_type = other DNA
agaggctaaagcaggaggac

SEQ ID NO: 1349 - DNA, 20 bp, synthetic construct
  source 1..20: mol_type = other DNA
cctagcttagatataacctc

SEQ ID NO: 1350 - DNA, 20 bp, synthetic construct
  source 1..20: mol_type = other DNA
gcatcattacgaccattctg

SEQ ID NO: 1351 - DNA, 20 bp, synthetic construct
  source 1..20: mol_type = other DNA
aatcatatgttcacacaaaa

SEQ ID NO: 1352 - DNA, 20 bp, synthetic construct
  source 1..20: mol_type = other DNA
aataacattttttaatacca

SEQ ID NO: 1353 - DNA, 20 bp, synthetic construct
  source 1..20: mol_type = other DNA
catggcttaaagctcagaat

SEQ ID NO: 1354 - DNA, 20 bp, synthetic construct
  source 1..20: mol_type = other DNA
cttggtcatgaagccatgaa

SEQ ID NO: 1355 - DNA, 20 bp, synthetic construct
  source 1..20: mol_type = other DNA
acttaagtaactaatattta

SEQ ID NO: 1356 - DNA, 20 bp, synthetic construct
  source 1..20: mol_type = other DNA
ggaaaccccgagtcgggcaa

SEQ ID NO: 1357 - DNA, 20 bp, synthetic construct
  source 1..20: mol_type = other DNA
attactagtgtatctgtcat

SEQ ID NO: 1358 - DNA, 20 bp, synthetic construct
  source 1..20: mol_type = other DNA
aaacctccgtctcaaagaaa

SEQ ID NO: 1359 - DNA, 20 bp, synthetic construct
  source 1..20: mol_type = other DNA
gctaggactacaggtacgcg

SEQ ID NO: 1360 - DNA, 20 bp, synthetic construct
  source 1..20: mol_type = other DNA
aaattcctgaagtctaagga

SEQ ID NO: 1361 - DNA, 20 bp, synthetic construct
  source 1..20: mol_type = other DNA
atgcactgcttgcctggaga

SEQ ID NO: 1362 - DNA, 20 bp, synthetic construct
  source 1..20: mol_type = other DNA
gcaatgaaactgttctatta

SEQ ID NO: 1363 - DNA, 20 bp, synthetic construct
  source 1..20: mol_type = other DNA
tccatcatttaaaaatcctc

SEQ ID NO: 1364 - DNA, 20 bp, synthetic construct
  source 1..20: mol_type = other DNA
agtaataaaaatttaatgac

SEQ ID NO: 1365 - DNA, 20 bp, synthetic construct
  source 1..20: mol_type = other DNA
gttagcatcaagaacttaaa

SEQ ID NO: 1366 - DNA, 20 bp, synthetic construct
  source 1..20: mol_type = other DNA
tcaagtgcagcaataaagac

SEQ ID NO: 1367 - DNA, 20 bp, synthetic construct
  source 1..20: mol_type = other DNA
ttttatgctagaggttttta

SEQ ID NO: 1368 - DNA, 20 bp, synthetic construct
  source 1..20: mol_type = other DNA
acaataaaataaaaataaac

SEQ ID NO: 1369 - DNA, 20 bp, synthetic construct
  source 1..20: mol_type = other DNA
agataaaaggcactgcaatt

SEQ ID NO: 1370 - DNA, 20 bp, synthetic construct
  source 1..20: mol_type = other DNA
gaaaaaaaaaatctacagtg

SEQ ID NO: 1371 - DNA, 20 bp, synthetic construct
  source 1..20: mol_type = other DNA
ctgacaagcaggaagaaaga

SEQ ID NO: 1372 - DNA, 20 bp, synthetic construct
  source 1..20: mol_type = other DNA
cgtgtatagctgggagcggt

SEQ ID NO: 1373 - DNA, 20 bp, synthetic construct
  source 1..20: mol_type = other DNA
aaagaatattaattttccat

SEQ ID NO: 1374 - DNA, 20 bp, synthetic construct
  source 1..20: mol_type = other DNA
ccagcaaatttaagcatgga

SEQ ID NO: 1375 - DNA, 20 bp, synthetic construct
  source 1..20: mol_type = other DNA
ctcactacaataacaacaac

SEQ ID NO: 1376 - DNA, 20 bp, synthetic construct
  source 1..20: mol_type = other DNA
gcttggaaagctgaggcagt

SEQ ID NO: 1377 - DNA, 20 bp, synthetic construct
  source 1..20: mol_type = other DNA
gaaaatgaagcttgtttttc

SEQ ID NO: 1378 - DNA, 20 bp, synthetic construct
  source 1..20: mol_type = other DNA
caatgccccagggtttattc

SEQ ID NO: 1379 - DNA, 20 bp, synthetic construct
  source 1..20: mol_type = other DNA
ctttccaaatttaaatagct

SEQ ID NO: 1380 - DNA, 20 bp, synthetic construct
  source 1..20: mol_type = other DNA
ttttagcataacttaactga

SEQ ID NO: 1381 - DNA, 20 bp, synthetic construct
  source 1..20: mol_type = other DNA
catgataaaatatttttaac

SEQ ID NO: 1382 - DNA, 20 bp, synthetic construct
  source 1..20: mol_type = other DNA
aatcatgttattctcaaaat

SEQ ID NO: 1383 - DNA, 20 bp, synthetic construct
  source 1..20: mol_type = other DNA
acaccagagtccagtacatc

SEQ ID NO: 1384 - DNA, 20 bp, synthetic construct
  source 1..20: mol_type = other DNA
attttaaaaaccactgattt

SEQ ID NO: 1385 - DNA, 20 bp, synthetic construct
  source 1..20: mol_type = other DNA
aacaagcatgtgaagataat

SEQ ID NO: 1386 - DNA, 20 bp, synthetic construct
  source 1..20: mol_type = other DNA
ctcctgcctcagtcttgcga

SEQ ID NO: 1387 - DNA, 20 bp, synthetic construct
  source 1..20: mol_type = other DNA
aatgatttaaaataatttta

SEQ ID NO: 1388 - DNA, 20 bp, synthetic construct
  source 1..20: mol_type = other DNA
aaccgaattcagtaacacat

SEQ ID NO: 1389 - DNA, 20 bp, synthetic construct
  source 1..20: mol_type = other DNA
caggaagaataaaaaatgaa

SEQ ID NO: 1390 - DNA, 20 bp, synthetic construct
  source 1..20: mol_type = other DNA
tgcaattcctggacaagtca

SEQ ID NO: 1391 - DNA, 20 bp, synthetic construct
  source 1..20: mol_type = other DNA
cacagtcaccaaagcactca

SEQ ID NO: 1392 - DNA, 20 bp, synthetic construct
  source 1..20: mol_type = other DNA
gcccaagatcacatctaatt

SEQ ID NO: 1393 - DNA, 20 bp, synthetic construct
  source 1..20: mol_type = other DNA
ataactgtaggtatatataa

SEQ ID NO: 1394 - DNA, 20 bp, synthetic construct
  source 1..20: mol_type = other DNA
acagataaattgaacttcat

SEQ ID NO: 1395 - DNA, 20 bp, synthetic construct
  source 1..20: mol_type = other DNA
tactaaaagtagtaacttta

SEQ ID NO: 1396 - DNA, 20 bp, synthetic construct
  source 1..20: mol_type = other DNA
aggctgaggtagaaagataa

SEQ ID NO: 1397 - DNA, 20 bp, synthetic construct
  source 1..20: mol_type = other DNA
ctccttctggtaaacaaaaa

SEQ ID NO: 1398 - DNA, 20 bp, synthetic construct
  source 1..20: mol_type = other DNA
cacactggaagagacaaaca

SEQ ID NO: 1399 - DNA, 20 bp, synthetic construct
  source 1..20: mol_type = other DNA
ccgttaagacaactaaagac

SEQ ID NO: 1400 - DNA, 20 bp, synthetic construct
  source 1..20: mol_type = other DNA
aggtttttgacaaaagccct

SEQ ID NO: 1401 - DNA, 20 bp, synthetic construct
  source 1..20: mol_type = other DNA
tctccatgaaggagcaacta

SEQ ID NO: 1402 - DNA, 20 bp, synthetic construct
  source 1..20: mol_type = other DNA
agacaaaaaaggaaccaggg

SEQ ID NO: 1403 - DNA, 20 bp, synthetic construct
  source 1..20: mol_type = other DNA
ttccttcatatccagtttag

SEQ ID NO: 1404 - DNA, 20 bp, synthetic construct
  source 1..20: mol_type = other DNA
gacggagtttcacagtgttc

SEQ ID NO: 1405 - DNA, 20 bp, synthetic construct
  source 1..20: mol_type = other DNA
acacctttcacctgtagcag

SEQ ID NO: 1406 - DNA, 20 bp, synthetic construct
  source 1..20: mol_type = other DNA
agcactggccctgcctgcca

SEQ ID NO: 1407 - DNA, 20 bp, synthetic construct
  source 1..20: mol_type = other DNA
gaggagctgcggccgctgag

SEQ ID NO: 1408 - DNA, 20 bp, synthetic construct
  source 1..20: mol_type = other DNA
gtctgaggcggagggaggcg

SEQ ID NO: 1409 - DNA, 20 bp, synthetic construct
  source 1..20: mol_type = other DNA
cacttgtacttcacatttgg

SEQ ID NO: 1410 - DNA, 20 bp, synthetic construct
  source 1..20: mol_type = other DNA
atcatcattttccagggcca

SEQ ID NO: 1411 - DNA, 20 bp, synthetic construct
  source 1..20: mol_type = other DNA
accagaattcgggttgaaat

SEQ ID NO: 1412 - DNA, 20 bp, synthetic construct
  source 1..20: mol_type = other DNA
ctaggtgatgtttcattggg

SEQ ID NO: 1413 - DNA, 20 bp, synthetic construct
  source 1..20: mol_type = other DNA
cttgtgctccgtgttactaa

SEQ ID NO: 1414 - DNA, 20 bp, synthetic construct
  source 1..20: mol_type = other DNA
cttgtctccttgttgtatgg

SEQ ID NO: 1415 - DNA, 20 bp, synthetic construct
  source 1..20: mol_type = other DNA
atatatattttaaaaacaaa

SEQ ID NO: 1416 - DNA, 20 bp, synthetic construct
  source 1..20: mol_type = other DNA
tccagtttcggcaagcagag

SEQ ID NO: 1417 - DNA, 20 bp, synthetic construct
  source 1..20: mol_type = other DNA
acggtaagaatttactgaaa

SEQ ID NO: 1418 - DNA, 20 bp, synthetic construct
  source 1..20: mol_type = other DNA
actttttttattttttaaat

SEQ ID NO: 1419 - DNA, 20 bp, synthetic construct
  source 1..20: mol_type = other DNA
gaggccacatggagccccac

SEQ ID NO: 1420 - DNA, 20 bp, synthetic construct
  source 1..20: mol_type = other DNA
tccggaggagcccggtgcct

SEQ ID NO: 1421 - DNA, 20 bp, synthetic construct
  source 1..20: mol_type = other DNA
ttcttgacactggaagtaat

SEQ ID NO: 1422 - DNA, 20 bp, synthetic construct
  source 1..20: mol_type = other DNA
ttgagatcctcctttaagtc

SEQ ID NO: 1423 - DNA, 20 bp, synthetic construct
  source 1..20: mol_type = other DNA
gccaaaatcaaggttacaaa

SEQ ID NO: 1424 - DNA, 20 bp, synthetic construct
  source 1..20: mol_type = other DNA
ataaagaactctccagacca

SEQ ID NO: 1425 - DNA, 20 bp, synthetic construct
  source 1..20: mol_type = other DNA
attcaaatttaactgagtgt

SEQ ID NO: 1426 - DNA, 20 bp, synthetic construct
  source 1..20: mol_type = other DNA
gcattggcctactccgtgaa

SEQ ID NO: 1427 - DNA, 20 bp, synthetic construct
  source 1..20: mol_type = other DNA
aaccaagagaaataaaatca

SEQ ID NO: 1428 - DNA, 20 bp, synthetic construct
  source 1..20: mol_type = other DNA
gctagtgactcaagttcctg

SEQ ID NO: 1429 - DNA, 20 bp, synthetic construct
  source 1..20: mol_type = other DNA
agttaatgggaaacatgatc

SEQ ID NO: 1430 - DNA, 20 bp, synthetic construct
  source 1..20: mol_type = other DNA
agggataaaaggcttggtca

SEQ ID NO: 1431 - DNA, 20 bp, synthetic construct
  source 1..20: mol_type = other DNA
tgaaagaagccttctcaaac

SEQ ID NO: 1432 - DNA, 20 bp, synthetic construct
  source 1..20: mol_type = other DNA
atttttgacaagctgaccgt

SEQ ID NO: 1433 - DNA, 20 bp, synthetic construct
  source 1..20: mol_type = other DNA
gatctgtattataattacta

SEQ ID NO: 1434 - DNA, 20 bp, synthetic construct
  source 1..20: mol_type = other DNA
cgccctgactcacgcctgta

SEQ ID NO: 1435 - DNA, 20 bp, synthetic construct
  source 1..20: mol_type = other DNA
atccagaatgcagtaaatgc

SEQ ID NO: 1436 - DNA, 20 bp, synthetic construct
  source 1..20: mol_type = other DNA
aaacaatggacttgaattaa

SEQ ID NO: 1437 - DNA, 20 bp, synthetic construct
  source 1..20: mol_type = other DNA
atttccaaacttaaaatata

SEQ ID NO: 1438 - DNA, 20 bp, synthetic construct
  source 1..20: mol_type = other DNA
gatggaagacaaatcaatgg

SEQ ID NO: 1439 - DNA, 20 bp, synthetic construct
  source 1..20: mol_type = other DNA
agctcatcaaggtaccagtt

SEQ ID NO: 1440 - DNA, 20 bp, synthetic construct
  source 1..20: mol_type = other DNA
gaaatgaagatctaataaag

SEQ ID NO: 1441 - DNA, 20 bp, synthetic construct
  source 1..20: mol_type = other DNA
cttttaaactttattgaaat

SEQ ID NO: 1442 - DNA, 20 bp, synthetic construct
  source 1..20: mol_type = other DNA
tgaaggaaaagaagcccagg

SEQ ID NO: 1443 - DNA, 20 bp, synthetic construct
  source 1..20: mol_type = other DNA
atttttagtagagccatgtc

SEQ ID NO: 1444 - DNA, 20 bp, synthetic construct
  source 1..20: mol_type = other DNA
aatttctttaaaaatacaat

SEQ ID NO: 1445 - DNA, 20 bp, synthetic construct
  source 1..20: mol_type = other DNA
tagtttgactaagcccatta

SEQ ID NO: 1446 - DNA, 20 bp, synthetic construct
  source 1..20: mol_type = other DNA
accacacttattttctattt

SEQ ID NO: 1447 - DNA, 20 bp, synthetic construct
  source 1..20: mol_type = other DNA
tccaaggtcatcaatgccct

SEQ ID NO: 1448 - DNA, 20 bp, synthetic construct
  source 1..20: mol_type = other DNA
ctggagtggcattaaaaata

SEQ ID NO: 1449 - DNA, 20 bp, synthetic construct
  source 1..20: mol_type = other DNA
tcaaagaatattaattttcc

SEQ ID NO: 1450 - DNA, 20 bp, synthetic construct
  source 1..20: mol_type = other DNA
gccaaaataagaaatctgag

SEQ ID NO: 1451 - DNA, 20 bp, synthetic construct
  source 1..20: mol_type = other DNA
atacactcactacaataaca

SEQ ID NO: 1452 - DNA, 20 bp, synthetic construct
  source 1..20: mol_type = other DNA
ttgcagtgtgacagagcaag

SEQ ID NO: 1453 - DNA, 20 bp, synthetic construct
  source 1..20: mol_type = other DNA
atcaaagacaaatgcactaa

SEQ ID NO: 1454 - DNA, 20 bp, synthetic construct
  source 1..20: mol_type = other DNA
ttgaactatttcagtgcact

SEQ ID NO: 1455 - DNA, 20 bp, synthetic construct
  source 1..20: mol_type = other DNA
ctctattttcatctaacttt

SEQ ID NO: 1456 - DNA, 20 bp, synthetic construct
  source 1..20: mol_type = other DNA
gtacattttaaccctttgag

SEQ ID NO: 1457 - DNA, 20 bp, synthetic construct
  source 1..20: mol_type = other DNA
acatgataaaatatttttaa

SEQ ID NO: 1458 - DNA, 20 bp, synthetic construct
  source 1..20: mol_type = other DNA
ctccaaaactatgcttatac

SEQ ID NO: 1459 - DNA, 20 bp, synthetic construct
  source 1..20: mol_type = other DNA
tgtgtacaaagtataaatct

SEQ ID NO: 1460 - DNA, 20 bp, synthetic construct
  source 1..20: mol_type = other DNA
cgactgctaaactgggcacg

SEQ ID NO: 1461 - DNA, 20 bp, synthetic construct
  source 1..20: mol_type = other DNA
ttccaacaagcatgtgaaga

SEQ ID NO: 1462 - DNA, 20 bp, synthetic construct
  source 1..20: mol_type = other DNA
tcctctctgcactatactaa

SEQ ID NO: 1463 - DNA, 20 bp, synthetic construct
  source 1..20: mol_type = other DNA
aatttagaaagaacgaataa

SEQ ID NO: 1464 - DNA, 20 bp, synthetic construct
  source 1..20: mol_type = other DNA
tacaaaaccaaaggacacat

SEQ ID NO: 1465 - DNA, 20 bp, synthetic construct
  source 1..20: mol_type = other DNA
agaaaaatacagaatattgt

SEQ ID NO: 1466 - DNA, 20 bp, synthetic construct
  source 1..20: mol_type = other DNA
ggcactatggtctgtaatcc

SEQ ID NO: 1467 - DNA, 20 bp, synthetic construct
  source 1..20: mol_type = other DNA
atatcttaaataactttagt

SEQ ID NO: 1468 - DNA, 20 bp, synthetic construct
  source 1..20: mol_type = other DNA
ataaacctgacagcctagct

SEQ ID NO: 1469 - DNA, 20 bp, synthetic construct
  source 1..20: mol_type = other DNA
ggctaagatttctatttttt

SEQ ID NO: 1470 - DNA, 20 bp, synthetic construct
  source 1..20: mol_type = other DNA
agcaacaaaagaaaaaacaa

SEQ ID NO: 1471 - DNA, 20 bp, synthetic construct
  source 1..20: mol_type = other DNA
ggctcttcaaaaaaaaccgc

SEQ ID NO: 1472 - DNA, 20 bp, synthetic construct
  source 1..20: mol_type = other DNA
ctgggtgtgatggctcatcc

SEQ ID NO: 1473 - DNA, 20 bp, synthetic construct
  source 1..20: mol_type = other DNA
cacctccttctggtaaacaa

SEQ ID NO: 1474 - DNA, 20 bp, synthetic construct
  source 1..20: mol_type = other DNA
tagatagagtatgttttcag

SEQ ID NO: 1475 - DNA, 20 bp, synthetic construct
  source 1..20: mol_type = other DNA
atattcagtccccgttaaga

SEQ ID NO: 1476 - DNA, 20 bp, synthetic construct
  source 1..20: mol_type = other DNA
ggtaaaagcatcaccataaa

SEQ ID NO: 1477 - DNA, 20 bp, synthetic construct
  source 1..20: mol_type = other DNA
ctttctccatgaaggagcaa

SEQ ID NO: 1478 - DNA, 20 bp, synthetic construct
  source 1..20: mol_type = other DNA
aagcagggtaggaagaaaat

SEQ ID NO: 1479 - DNA, 20 bp, synthetic construct
  source 1..20: mol_type = other DNA
tctaggatcacctgtgcatc

SEQ ID NO: 1480 - DNA, 20 bp, synthetic construct
  source 1..20: mol_type = other DNA
tcaacatgtatcttaaatgt

SEQ ID NO: 1481 - DNA, 20 bp, synthetic construct
  source 1..20: mol_type = other DNA
agacagcaaccactgagatg

SEQ ID NO: 1482 - DNA, 20 bp, synthetic construct
  source 1..20: mol_type = other DNA
ctcggctcccggaagcctca

SEQ ID NO: 1483 - DNA, 20 bp, synthetic construct
  source 1..20: mol_type = other DNA
actccgaggagctgcggccg

SEQ ID NO: 1484 - DNA, 20 bp, synthetic construct
  source 1..20: mol_type = other DNA
aaacagtctgaggcggaggg

SEQ ID NO: 1485 - DNA, 20 bp, synthetic construct
  source 1..20: mol_type = other DNA
ttttctcatgtgcggcatca

SEQ ID NO: 1486 - DNA, 20 bp, synthetic construct
  source 1..20: mol_type = other DNA
tatcatcattttccagggcc

SEQ ID NO: 1487 - DNA, 20 bp, synthetic construct
  source 1..20: mol_type = other DNA
aaccagaattcgggttgaaa

SEQ ID NO: 1488 - DNA, 20 bp, synthetic construct
  source 1..20: mol_type = other DNA
gctaggtgatgtttcattgg

SEQ ID NO: 1489 - DNA, 20 bp, synthetic construct
  source 1..20: mol_type = other DNA
gaagtctgaaccccttggga

SEQ ID NO: 1490 - DNA, 20 bp, synthetic construct
  source 1..20: mol_type = other DNA
attggcgcatgggcagttgg

SEQ ID NO: 1491 - DNA, 20 bp, synthetic construct
  source 1..20: mol_type = other DNA
tcaacatatatattttaaaa

SEQ ID NO: 1492 - DNA, 20 bp, synthetic construct
  source 1..20: mol_type = other DNA
taacttccagtttcggcaag

SEQ ID NO: 1493 - DNA, 20 bp, synthetic construct
  source 1..20: mol_type = other DNA
gtttgacggtaagaatttac

SEQ ID NO: 1494 - DNA, 20 bp, synthetic construct
  source 1..20: mol_type = other DNA
tttttaaaactttttttatt

SEQ ID NO: 1495 - DNA, 20 bp, synthetic construct
  source 1..20: mol_type = other DNA
tgccggaggccacatggagc

SEQ ID NO: 1496 - DNA, 20 bp, synthetic construct
  source 1..20: mol_type = other DNA
cagaccctgatgattccgga

SEQ ID NO: 1497 - DNA, 20 bp, synthetic construct
  source 1..20: mol_type = other DNA
aaccaagtaccctcattaat

SEQ ID NO: 1498 - DNA, 20 bp, synthetic construct
  source 1..20: mol_type = other DNA
ccgcactcattgcaacctcc

SEQ ID NO: 1499 - DNA, 20 bp, synthetic construct
  source 1..20: mol_type = other DNA
caaaataaataaataaccaa

SEQ ID NO: 1500 - DNA, 20 bp, synthetic construct
  source 1..20: mol_type = other DNA
aaaagttctcaaagaggcca

SEQ ID NO: 1501 - DNA, 20 bp, synthetic construct
  source 1..20: mol_type = other DNA
gttcatcaaaaattcaaatt

SEQ ID NO: 1502 - DNA, 20 bp, synthetic construct
  source 1..20: mol_type = other DNA
atgaactcctgctgcctggg

SEQ ID NO: 1503 - DNA, 20 bp, synthetic construct
  source 1..20: mol_type = other DNA
caatctcatttctatgcatt

SEQ ID NO: 1504 - DNA, 20 bp, synthetic construct
  source 1..20: mol_type = other DNA
cctgggtttaagtgaccctc

SEQ ID NO: 1505 - DNA, 20 bp, synthetic construct
  source 1..20: mol_type = other DNA
ttagtttcatggaaaatttg

SEQ ID NO: 1506 - DNA, 20 bp, synthetic construct
  source 1..20: mol_type = other DNA
ccttgagtccctctagagaa

SEQ ID NO: 1507 - DNA, 20 bp, synthetic construct
  source 1..20: mol_type = other DNA
atgtcacctcctgaaagaag

SEQ ID NO: 1508 - DNA, 20 bp, synthetic construct
  source 1..20: mol_type = other DNA
tcattttattctgctttgct

SEQ ID NO: 1509 - DNA, 20 bp, synthetic construct
  source 1..20: mol_type = other DNA
aataatacttaatcctactc

SEQ ID NO: 1510 - DNA, 20 bp, synthetic construct
  source 1..20: mol_type = other DNA
agaaaaccataattaatgca

SEQ ID NO: 1511 - DNA, 20 bp, synthetic construct
  source 1..20: mol_type = other DNA
gaatatattaactgatacca

SEQ ID NO: 1512 - DNA, 20 bp, synthetic construct
  source 1..20: mol_type = other DNA
acttttcctcactttcttct

SEQ ID NO: 1513 - DNA, 20 bp, synthetic construct
  source 1..20: mol_type = other DNA
acaggctaaataagctgaaa

SEQ ID NO: 1514 - DNA, 20 bp, synthetic construct
  source 1..20: mol_type = other DNA
ggaaggacacaaaccgtaag

SEQ ID NO: 1515 - DNA, 20 bp, synthetic construct
  source 1..20: mol_type = other DNA
tctttagctcatcaaggtac

SEQ ID NO: 1516 - DNA, 20 bp, synthetic construct
  source 1..20: mol_type = other DNA
gttttgaaataagatacctg

SEQ ID NO: 1517 - DNA, 20 bp, synthetic construct
  source 1..20: mol_type = other DNA
atgcatgaatataactttta

SEQ ID NO: 1518 - DNA, 20 bp, synthetic construct
  source 1..20: mol_type = other DNA
agctggcagtgtgtgtcatg

SEQ ID NO: 1519 - DNA, 20 bp, synthetic construct
  source 1..20: mol_type = other DNA
caggtgcccgtcacctcgcc

SEQ ID NO: 1520 - DNA, 20 bp, synthetic construct
  source 1..20: mol_type = other DNA
tgttttgcaactccctcagt

SEQ ID NO: 1521 - DNA, 20 bp, synthetic construct
  source 1..20: mol_type = other DNA
gtgagaggtacaaattggat

SEQ ID NO: 1522 - DNA, 20 bp, synthetic construct
  source 1..20: mol_type = other DNA
acaatatttgccttggtgga

SEQ ID NO: 1523 - DNA, 20 bp, synthetic construct
  source 1..20: mol_type = other DNA
ataaagatgtaaatttctct

SEQ ID NO: 1524 - DNA, 20 bp, synthetic construct
  source 1..20: mol_type = other DNA
tagactggagtggcattaaa

SEQ ID NO: 1525 - DNA, 20 bp, synthetic construct
  source 1..20: mol_type = other DNA
ccaatgccataagtcaaaga

SEQ ID NO: 1526 - DNA, 20 bp, synthetic construct
  source 1..20: mol_type = other DNA
ctctgctgaggaatataagc

SEQ ID NO: 1527 - DNA, 20 bp, synthetic construct
  source 1..20: mol_type = other DNA
cccctacaagtaaaatgaca

SEQ ID NO: 1528 - DNA, 20 bp, synthetic construct
  source 1..20: mol_type = other DNA
ggcaataagaatatgaacag

SEQ ID NO: 1529 - DNA, 20 bp, synthetic construct
  source 1..20: mol_type = other DNA
atttattcatcataaattaa

SEQ ID NO: 1530 - DNA, 20 bp, synthetic construct
  source 1..20: mol_type = other DNA
cagttgaactatttcagtgc

SEQ ID NO: 1531 - DNA, 20 bp, synthetic construct
  source 1..20: mol_type = other DNA
aaacttagtgttctctattt

SEQ ID NO: 1532 - DNA, 20 bp, synthetic construct
  source 1..20: mol_type = other DNA
atgatatgaaggaaagtata

SEQ ID NO: 1533 - DNA, 20 bp, synthetic construct
  source 1..20: mol_type = other DNA
tttgtaaagaaatatgttac

SEQ ID NO: 1534 - DNA, 20 bp, synthetic construct
  source 1..20: mol_type = other DNA
ctataatgctattctgagtg

SEQ ID NO: 1535 - DNA, 20 bp, synthetic construct
  source 1..20: mol_type = other DNA
aaggagagatgttaagtaaa

SEQ ID NO: 1536 - DNA, 20 bp, synthetic construct
  source 1..20: mol_type = other DNA
gaagggctggaggcaaatgt

SEQ ID NO: 1537 - DNA, 20 bp, synthetic construct
  source 1..20: mol_type = other DNA
tttgtagtcaacagacttcc

SEQ ID NO: 1538 - DNA, 20 bp, synthetic construct
  source 1..20: mol_type = other DNA
aatatagcactctgctgtat

SEQ ID NO: 1539 - DNA, 20 bp, synthetic construct
  source 1..20: mol_type = other DNA
ggagaagaagggaaatgagg

SEQ ID NO: 1540 - DNA, 20 bp, synthetic construct
  source 1..20: mol_type = other DNA
ctattaccctatacaaaacc

SEQ ID NO: 1541 - DNA, 20 bp, synthetic construct
  source 1..20: mol_type = other DNA
ctcactggtaacaagtacac

SEQ ID NO: 1542 - DNA, 20 bp, synthetic construct
  source 1..20: mol_type = other DNA
aaggaaaaagacaccaaaaa

SEQ ID NO: 1543 - DNA, 20 bp, synthetic construct
  source 1..20: mol_type = other DNA
aaggaaacaattatacttaa

SEQ ID NO: 1544 - DNA, 20 bp, synthetic construct
  source 1..20: mol_type = other DNA
agattatcctaactatgttt

SEQ ID NO: 1545 - DNA, 20 bp, synthetic construct
  source 1..20: mol_type = other DNA
tttcaattgatcctcccacc

SEQ ID NO: 1546 - DNA, 20 bp, synthetic construct
  source 1..20: mol_type = other DNA
ttcataggagtaaatctctg

SEQ ID NO: 1547 - DNA, 20 bp, synthetic construct
  source 1..20: mol_type = other DNA
cattaaaattaacaatactg

SEQ ID NO: 1548 - DNA, 20 bp, synthetic construct
  source 1..20: mol_type = other DNA
gtgggaaaaaaatacaagac

SEQ ID NO: 1549 - DNA, 20 bp, synthetic construct
  source 1..20: mol_type = other DNA
gttacatattattttatcta

SEQ ID NO: 1550 - DNA, 20 bp, synthetic construct
  source 1..20: mol_type = other DNA
aaaggtcaggttattcttag

SEQ ID NO: 1551 - DNA, 20 bp, synthetic construct
  source 1..20: mol_type = other DNA
cataatgaacttttaaccta

SEQ ID NO: 1552 - DNA, 20 bp, synthetic construct
  source 1..20: mol_type = other DNA
tcttcctaatggctctagtt

SEQ ID NO: 1553 - DNA, 20 bp, synthetic construct
  source 1..20: mol_type = other DNA
ggaactcttgtgcctccgcc

SEQ ID NO: 1554 - DNA, 20 bp, synthetic construct
  source 1..20: mol_type = other DNA
ttccttgataggccagttaa

SEQ ID NO: 1555 - DNA, 20 bp, synthetic construct
  source 1..20: mol_type = other DNA
agggcaaggcaaagagccag

SEQ ID NO: 1556 - DNA, 20 bp, synthetic construct
  source 1..20: mol_type = other DNA
ccaatcaccttattatcaac

SEQ ID NO: 1557 - DNA, 20 bp, synthetic construct
  source 1..20: mol_type = other DNA
cagacagcaaccactgagat

SEQ ID NO: 1558 - DNA, 20 bp, synthetic construct
  source 1..20: mol_type = other DNA
ctgtataccatcagaacaca

SEQ ID NO: 1559 - DNA, 20 bp, synthetic construct
  source 1..20: mol_type = other DNA
gcgggactccgaggagctgc

SEQ ID NO: 1560 - DNA, 20 bp, synthetic construct
  source 1..20: mol_type = other DNA
taccaaaacagtctgaggcg

SEQ ID NO: 1561 - DNA, 20 bp, synthetic construct
  source 1..20: mol_type = other DNA
acttttctcatgtgcggcat

SEQ ID NO: 1562 - DNA, 20 bp, synthetic construct
  source 1..20: mol_type = other DNA
ctatcatcattttccagggc

SEQ ID NO: 1563 - DNA, 20 bp, synthetic construct
  source 1..20: mol_type = other DNA
tgaaccagaattcgggttga

SEQ ID NO: 1564 - DNA, 20 bp, synthetic construct
  source 1..20: mol_type = other DNA
agctaggtgatgtttcattg

SEQ ID NO: 1565 - DNA, 20 bp, synthetic construct
  source 1..20: mol_type = other DNA
tggaagtctgaaccccttgg

SEQ ID NO: 1566 - DNA, 20 bp, synthetic construct
  source 1..20: mol_type = other DNA
tcattggcgcatgggcagtt

SEQ ID NO: 1567 - DNA, 20 bp, synthetic construct
  source 1..20: mol_type = other DNA
agaaatcaacatatatattt

SEQ ID NO: 1568 - DNA, 20 bp, synthetic construct
  source 1..20: mol_type = other DNA
taaaaaataaataacttcca

SEQ ID NO: 1569 - DNA, 20 bp, synthetic construct
  source 1..20: mol_type = other DNA
cgtcagtttgacggtaagaa

SEQ ID NO: 1570 - DNA, 20 bp, synthetic construct
  source 1..20: mol_type = other DNA
ttcagtttttaaaacttttt

SEQ ID NO: 1571 - DNA, 20 bp, synthetic construct
  source 1..20: mol_type = other DNA
ccttcccttccccaggtggg

SEQ ID NO: 1572 - DNA, 20 bp, synthetic construct
  source 1..20: mol_type = other DNA
ctcctagcatttccgaaatt

SEQ ID NO: 1573 - DNA, 20 bp, synthetic construct
  source 1..20: mol_type = other DNA
ttcctcaggaatttcattcc

SEQ ID NO: 1574 - DNA, 20 bp, synthetic construct
  source 1..20: mol_type = other DNA
actgcaacctccgcactcat

SEQ ID NO: 1575 - DNA, 20 bp, synthetic construct
  source 1..20: mol_type = other DNA
aaaaattttgctgggcatag

SEQ ID NO: 1576 - DNA, 20 bp, synthetic construct
  source 1..20: mol_type = other DNA
atctgcctctgaaaacattg

SEQ ID NO: 1577 - DNA, 20 bp, synthetic construct
  source 1..20: mol_type = other DNA
gatgctcagttaaatttcaa

SEQ ID NO: 1578 - DNA, 20 bp, synthetic construct
  source 1..20: mol_type = other DNA
acttcatgaactcctgctgc

SEQ ID NO: 1579 - DNA, 20 bp, synthetic construct
  source 1..20: mol_type = other DNA
gtaccctggaaaaataaaca

SEQ ID NO: 1580 - DNA, 20 bp, synthetic construct
  source 1..20: mol_type = other DNA
ctccaattcctgggtttaag

SEQ ID NO: 1581 - DNA, 20 bp, synthetic construct
  source 1..20: mol_type = other DNA
acaaagttaagttctacagg

SEQ ID NO: 1582 - DNA, 20 bp, synthetic construct
  source 1..20: mol_type = other DNA
cagtgcctttaccccttgag

SEQ ID NO: 1583 - DNA, 20 bp, synthetic construct
  source 1..20: mol_type = other DNA
cataagggtaccacatacct

SEQ ID NO: 1584 - DNA, 20 bp, synthetic construct
  source 1..20: mol_type = other DNA
gtgtacatgtgatggcaata

SEQ ID NO: 1585 - DNA, 20 bp, synthetic construct
  source 1..20: mol_type = other DNA
tccaaggcattttttaaata

SEQ ID NO: 1586 - DNA, 20 bp, synthetic construct
  source 1..20: mol_type = other DNA
ttaagaacgaaagaaaacca

SEQ ID NO: 1587 - DNA, 20 bp, synthetic construct
  source 1..20: mol_type = other DNA
caccttctgcttctgatgtg

SEQ ID NO: 1588 - DNA, 20 bp, synthetic construct
  source 1..20: mol_type = other DNA
cattctgaggccagtcctag

SEQ ID NO: 1589 - DNA, 20 bp, synthetic construct
  source 1..20: mol_type = other DNA
ctactaattttccccaataa

SEQ ID NO: 1590 - DNA, 20 bp, synthetic construct
  source 1..20: mol_type = other DNA
ttgactaaacatgacataaa

SEQ ID NO: 1591 - DNA, 20 bp, synthetic construct
  source 1..20: mol_type = other DNA
ctttacaaaataaaatttgt

SEQ ID NO: 1592 - DNA, 20 bp, synthetic construct
  source 1..20: mol_type = other DNA
cactaaaccactgtaagttt

SEQ ID NO: 1593 - DNA, 20 bp, synthetic construct
  source 1..20: mol_type = other DNA
gagaccaaaggaaacttatt

SEQ ID NO: 1594 - DNA, 20 bp, synthetic construct
  source 1..20: mol_type = other DNA
tacacacatgataggaggga

SEQ ID NO: 1595 - DNA, 20 bp, synthetic construct
  source 1..20: mol_type = other DNA
agtgcagcaccaccatctcg

SEQ ID NO: 1596 - DNA, 20 bp, synthetic construct
  source 1..20: mol_type = other DNA
gatagtaagtatattagcat

SEQ ID NO: 1597 - DNA, 20 bp, synthetic construct
  source 1..20: mol_type = other DNA
tttaagtaataaaaagcagt

SEQ ID NO: 1598 - DNA, 20 bp, synthetic construct
  source 1..20: mol_type = other DNA
aaatgagaaatctggaagac

SEQ ID NO: 1599 - DNA, 20 bp, synthetic construct
  source 1..20: mol_type = other DNA
aaatttcacttgaaggttag

SEQ ID NO: 1600 - DNA, 20 bp, synthetic construct
  source 1..20: mol_type = other DNA
tccaacatagactggagtgg

SEQ ID NO: 1601 - DNA, 20 bp, synthetic construct
  source 1..20: mol_type = other DNA
tctaatctacaggcaactgt

SEQ ID NO: 1602 - DNA, 20 bp, synthetic construct
  source 1..20: mol_type = other DNA
ggctctgctgaggaatataa

SEQ ID NO: 1603 - DNA, 20 bp, synthetic construct
  source 1..20: mol_type = other DNA
cttatttggctgggtgttaa

SEQ ID NO: 1604 - DNA, 20 bp, synthetic construct
  source 1..20: mol_type = other DNA
aactactattaagagttctg

SEQ ID NO: 1605 - DNA, 20 bp, synthetic construct
  source 1..20: mol_type = other DNA
ttggtaataagagaaaaatt

SEQ ID NO: 1606 - DNA, 20 bp, synthetic construct
  source 1..20: mol_type = other DNA
aacttgctccatgtttcctc

SEQ ID NO: 1607 - DNA, 20 bp, synthetic construct
  source 1..20: mol_type = other DNA
tgaaattggaaacttagtgt

SEQ ID NO: 1608 - DNA, 20 bp, synthetic construct
  source 1..20: mol_type = other DNA
gataaaccccctttttaaca

SEQ ID NO: 1609 - DNA, 20 bp, synthetic construct
  source 1..20: mol_type = other DNA
ttattatttccctttatttt

SEQ ID NO: 1610 - DNA, 20 bp, synthetic construct
  source 1..20: mol_type = other DNA
tctataatgctattctgagt

SEQ ID NO: 1611 - DNA, 20 bp, synthetic construct
  source 1..20: mol_type = other DNA
taacatgcaaaagaatgaaa

SEQ ID NO: 1612 - DNA, 20 bp, synthetic construct
  source 1..20: mol_type = other DNA
gattaacggttgcttagggt

SEQ ID NO: 1613 - DNA, 20 bp, synthetic construct
  source 1..20: mol_type = other DNA
aggacaattcagagtccagt

SEQ ID NO: 1614 - DNA, 20 bp, synthetic construct
  source 1..20: mol_type = other DNA
gaatatagcactctgctgta

SEQ ID NO: 1615 - DNA, 20 bp, synthetic construct
  source 1..20: mol_type = other DNA
gagatagcagaatggttacc

SEQ ID NO: 1616 - DNA, 20 bp, synthetic construct
  source 1..20: mol_type = other DNA
aaaaaagtggaaaaacttca

SEQ ID NO: 1617 - DNA, 20 bp, synthetic construct
  source 1..20: mol_type = other DNA
aggctggtaacagagcatga

SEQ ID NO: 1618 - DNA, 20 bp, synthetic construct
  source 1..20: mol_type = other DNA
aaaattaggtaagcgatcac

SEQ ID NO: 1619 - DNA, 20 bp, synthetic construct
  source 1..20: mol_type = other DNA
taaataaaggaaacaattat

SEQ ID NO: 1620 - DNA, 20 bp, synthetic construct
  source 1..20: mol_type = other DNA
gtgttcagtatagattatcc

SEQ ID NO: 1621 - DNA, 20 bp, synthetic construct
  source 1..20: mol_type = other DNA
tccctgcagcctggaccttc

SEQ ID NO: 1622 - DNA, 20 bp, synthetic construct
  source 1..20: mol_type = other DNA
aaatcataggagttttatag

SEQ ID NO: 1623 - DNA, 20 bp, synthetic construct
  source 1..20: mol_type = other DNA
caaagatcaatacaacaaaa

SEQ ID NO: 1624 - DNA, 20 bp, synthetic construct
  source 1..20: mol_type = other DNA
ttaaatatcaacacagggat

SEQ ID NO: 1625 - DNA, 20 bp, synthetic construct
  source 1..20: mol_type = other DNA
atttgggagagctagttaca

SEQ ID NO: 1626 - DNA, 20 bp, synthetic construct
  source 1..20: mol_type = other DNA
tagttaaagcaggaaagaga

SEQ ID NO: 1627 - DNA, 20 bp, synthetic construct
  source 1..20: mol_type = other DNA
aaacaatcataatgaacttt

SEQ ID NO: 1628 - DNA, 20 bp, synthetic construct
  source 1..20: mol_type = other DNA
aaaatgttaaaaggcagttg

SEQ ID NO: 1629 - DNA, 20 bp, synthetic construct
  source 1..20: mol_type = other DNA
ccacctccagggttcatgga

SEQ ID NO: 1630 - DNA, 20 bp, synthetic construct
  source 1..20: mol_type = other DNA
taatctatagctaatttgca

SEQ ID NO: 1631 - DNA, 20 bp, synthetic construct
  source 1..20: mol_type = other DNA
ttaggctaggcacatggagc

SEQ ID NO: 1632 - DNA, 20 bp, synthetic construct
  source 1..20: mol_type = other DNA
atttgatttttcattactgc

SEQ ID NO: 1633 - DNA, 20 bp, synthetic construct
  source 1..20: mol_type = other DNA
caatcccctgggccctggag

SEQ ID NO: 1634 - DNA, 20 bp, synthetic construct
  source 1..20: mol_type = other DNA
ccaaatcctgtataccatca

SEQ ID NO: 1635 - DNA, 20 bp, synthetic construct
  source 1..20: mol_type = other DNA
ccaccgcgggactccgagga

SEQ ID NO: 1636 - DNA, 20 bp, synthetic construct
  source 1..20: mol_type = other DNA
gttgctaccaaaacagtctg

SEQ ID NO: 1637 - DNA, 20 bp, synthetic construct
  source 1..20: mol_type = other DNA
tacttttctcatgtgcggca

SEQ ID NO: 1638 - DNA, 20 bp, synthetic construct
  source 1..20: mol_type = other DNA
tcctatcatcattttccagg

SEQ ID NO: 1639 - DNA, 20 bp, synthetic construct
  source 1..20: mol_type = other DNA
ctgaaccagaattcgggttg

SEQ ID NO: 1640 - DNA, 20 bp, synthetic construct
  source 1..20: mol_type = other DNA
gaagctaggtgatgtttcat

SEQ ID NO: 1641 - DNA, 20 bp, synthetic construct
  source 1..20: mol_type = other DNA
ctggaagtctgaaccccttg

SEQ ID NO: 1642 - DNA, 20 bp, synthetic construct
  source 1..20: mol_type = other DNA
atcattggcgcatgggcagt

SEQ ID NO: 1643 - DNA, 20 bp, synthetic construct
  source 1..20: mol_type = other DNA
ttacaagaaatcaacatata

SEQ ID NO: 1644 - DNA, 20 bp, synthetic construct
  source 1..20: mol_type = other DNA
gttattaaaaaataaataac

SEQ ID NO: 1645 - DNA, 20 bp, synthetic construct
  source 1..20: mol_type = other DNA
taatccgtcagtttgacggt

SEQ ID NO: 1646 - DNA, 20 bp, synthetic construct
  source 1..20: mol_type = other DNA
tttttttcagtttttaaaac

SEQ ID NO: 1647 - DNA, 20 bp, synthetic construct
  source 1..20: mol_type = other DNA
ccaccccttcccttccccag

SEQ ID NO: 1648 - DNA, 20 bp, synthetic construct
  source 1..20: mol_type = other DNA
cgctagtaaacacccgcctt

SEQ ID NO: 1649 - DNA, 20 bp, synthetic construct
  source 1..20: mol_type = other DNA
cctgtatcccaagcaattct

SEQ ID NO: 1650 - DNA, 20 bp, synthetic construct
  source 1..20: mol_type = other DNA
ttacatctccgttgaagttg

SEQ ID NO: 1651 - DNA, 20 bp, synthetic construct
  source 1..20: mol_type = other DNA
atgagaatcatttgaacgca

SEQ ID NO: 1652 - DNA, 20 bp, synthetic construct
  source 1..20: mol_type = other DNA
tttctgtttttcagtagaga

SEQ ID NO: 1653 - DNA, 20 bp, synthetic construct
  source 1..20: mol_type = other DNA
tagactggagttgccagata

SEQ ID NO: 1654 - DNA, 20 bp, synthetic construct
  source 1..20: mol_type = other DNA
cgtctggtccctgttcaaca

SEQ ID NO: 1655 - DNA, 20 bp, synthetic construct
  source 1..20: mol_type = other DNA
atcaccgaaaaaatttctca

SEQ ID NO: 1656 - DNA, 20 bp, synthetic construct
  source 1..20: mol_type = other DNA
ctaaattccctgaattccgt

SEQ ID NO: 1657 - DNA, 20 bp, synthetic construct
  source 1..20: mol_type = other DNA
atagtaagctactactgaat

SEQ ID NO: 1658 - DNA, 20 bp, synthetic construct
  source 1..20: mol_type = other DNA
tacagttccagttacttggg

SEQ ID NO: 1659 - DNA, 20 bp, synthetic construct
  source 1..20: mol_type = other DNA
tataatcaaaatatttcatt

SEQ ID NO: 1660 - DNA, 20 bp, synthetic construct
  source 1..20: mol_type = other DNA
cgtattttactagtgtacat

SEQ ID NO: 1661 - DNA, 20 bp, synthetic construct
  source 1..20: mol_type = other DNA
ttaattggagactataagtg

SEQ ID NO: 1662 - DNA, 20 bp, synthetic construct
  source 1..20: mol_type = other DNA
acccactggaaaaagaagta

SEQ ID NO: 1663 - DNA, 20 bp, synthetic construct
  source 1..20: mol_type = other DNA
taaatcaaacaagaatggta

SEQ ID NO: 1664 - DNA, 20 bp, synthetic construct
  source 1..20: mol_type = other DNA
tagaagagtactcttaacat

SEQ ID NO: 1665 - DNA, 20 bp, synthetic construct
  source 1..20: mol_type = other DNA
ttaaacagtcaagttatcta

SEQ ID NO: 1666 - DNA, 20 bp, synthetic construct
  source 1..20: mol_type = other DNA
aatggtgttttgactaaaca

SEQ ID NO: 1667 - DNA, 20 bp, synthetic construct
  source 1..20: mol_type = other DNA
cacctctttttgcataactg

SEQ ID NO: 1668 - DNA, 20 bp, synthetic construct
  source 1..20: mol_type = other DNA
atactacgcactggacgcaa

SEQ ID NO: 1669 - DNA, 20 bp, synthetic construct
  source 1..20: mol_type = other DNA
atcaagtaaaaaacaagcag

SEQ ID NO: 1670 - DNA, 20 bp, synthetic construct
  source 1..20: mol_type = other DNA
catggtataagggcaatgat

SEQ ID NO: 1671 - DNA, 20 bp, synthetic construct
  source 1..20: mol_type = other DNA
catgtcctatgcttattttt

SEQ ID NO: 1672 - DNA, 20 bp, synthetic construct
  source 1..20: mol_type = other DNA
aattccaattcttacagctg

SEQ ID NO: 1673 - DNA, 20 bp, synthetic construct
  source 1..20: mol_type = other DNA
agtgagataaaatagaaaaa

SEQ ID NO: 1674 - DNA, 20 bp, synthetic construct
  source 1..20: mol_type = other DNA
gatgatctaataaaagcaat

SEQ ID NO: 1675 - DNA, 20 bp, synthetic construct
  source 1..20: mol_type = other DNA
ataaatactgctaatactac

SEQ ID NO: 1676 - DNA, 20 bp, synthetic construct
  source 1..20: mol_type = other DNA
ctgatctaggccttcaagaa

SEQ ID NO: 1677 - DNA, 20 bp, synthetic construct
  source 1..20: mol_type = other DNA
tgttggtagtaaatagtaca

SEQ ID NO: 1678 - DNA, 20 bp, synthetic construct
  source 1..20: mol_type = other DNA
tctgctgatctggctctgct

SEQ ID NO: 1679 - DNA, 20 bp, synthetic construct
  source 1..20: mol_type = other DNA
ctctaggtgaagtcaacaat

SEQ ID NO: 1680 - DNA, 20 bp, synthetic construct
  source 1..20: mol_type = other DNA
agtaaaaagtaaatgtcttc

SEQ ID NO: 1681 - DNA, 20 bp, synthetic construct
  source 1..20: mol_type = other DNA
acagcgagattccctctcaa

SEQ ID NO: 1682 - DNA, 20 bp, synthetic construct
  source 1..20: mol_type = other DNA
aacggagtcactgtttttcc

SEQ ID NO: 1683 - DNA, 20 bp, synthetic construct
  source 1..20: mol_type = other DNA
tttggagaggaattctggag

SEQ ID NO: 1684 - DNA, 20 bp, synthetic construct
  source 1..20: mol_type = other DNA
caggcagagataaaccccct

SEQ ID NO: 1685 - DNA, 20 bp, synthetic construct
  source 1..20: mol_type = other DNA
atttttaacatatacatact

SEQ ID NO: 1686 - DNA, 20 bp, synthetic construct
  source 1..20: mol_type = other DNA
aatctataatgctattctga

SEQ ID NO: 1687 - DNA, 20 bp, synthetic construct
  source 1..20: mol_type = other DNA
cctttaattcagctactttt

SEQ ID NO: 1688 - DNA, 20 bp, synthetic construct
  source 1..20: mol_type = other DNA
agcccatccatagagacaga

SEQ ID NO: 1689 - DNA, 20 bp, synthetic construct
  source 1..20: mol_type = other DNA
ggataagacatagagattca

SEQ ID NO: 1690 - DNA, 20 bp, synthetic construct
  source 1..20: mol_type = other DNA
ttctaatgctatattgctat

SEQ ID NO: 1691 - DNA, 20 bp, synthetic construct
  source 1..20: mol_type = other DNA
tacggcactatatacacaac

SEQ ID NO: 1692 - DNA, 20 bp, synthetic construct
  source 1..20: mol_type = other DNA
tacagtaaaagcaacaataa

SEQ ID NO: 1693 - DNA, 20 bp, synthetic construct
  source 1..20: mol_type = other DNA
tcaccctgaggtcaggagct

SEQ ID NO: 1694 - DNA, 20 bp, synthetic construct
  source 1..20: mol_type = other DNA
caactatccacacaagaaag

SEQ ID NO: 1695 - DNA, 20 bp, synthetic construct
  source 1..20: mol_type = other DNA
cttggctgtaactaaataaa

SEQ ID NO: 1696 - DNA, 20 bp, synthetic construct
  source 1..20: mol_type = other DNA
ttatttataatacctaaaac

SEQ ID NO: 1697 - DNA, 20 bp, synthetic construct
  source 1..20: mol_type = other DNA
ctccctaattttaatgcaga

SEQ ID NO: 1698 - DNA, 20 bp, synthetic construct
  source 1..20: mol_type = other DNA
ctcatctcatacacaaaaat

SEQ ID NO: 1699 - DNA, 20 bp, synthetic construct
  source 1..20: mol_type = other DNA
tatttctcccagaactgata

SEQ ID NO: 1700 - DNA, 20 bp, synthetic construct
  source 1..20: mol_type = other DNA
ctcactgactactcctatca

SEQ ID NO: 1701 - DNA, 20 bp, synthetic construct
  source 1..20: mol_type = other DNA
aagaactgattatataatta

SEQ ID NO: 1702 - DNA, 20 bp, synthetic construct
  source 1..20: mol_type = other DNA
aagtagtgaagcaaaatgtt

SEQ ID NO: 1703 - DNA, 20 bp, synthetic construct
  source 1..20: mol_type = other DNA
atgttctttccacttgttaa

SEQ ID NO: 1704 - DNA, 20 bp, synthetic construct
  source 1..20: mol_type = other DNA
acatgaatattatttcttat

SEQ ID NO: 1705 - DNA, 20 bp, synthetic construct
  source 1..20: mol_type = other DNA
ccttatttttattttttatt

SEQ ID NO: 1706 - DNA, 20 bp, synthetic construct
  source 1..20: mol_type = other DNA
atttaaagactataatacgg

SEQ ID NO: 1707 - DNA, 20 bp, synthetic construct
  source 1..20: mol_type = other DNA
ggtaggcaaggctgccgagt

SEQ ID NO: 1708 - DNA, 20 bp, synthetic construct
  source 1..20: mol_type = other DNA
tactgccccagggaactgat

SEQ ID NO: 1709 - DNA, 20 bp, synthetic construct
  source 1..20: mol_type = other DNA
aaagcaaatcaactgcagtg

SEQ ID NO: 1710 - DNA, 20 bp, synthetic construct
  source 1..20: mol_type = other DNA
gaaggccaactgagtcctag

SEQ ID NO: 1711 - DNA, 20 bp, synthetic construct
  source 1..20: mol_type = other DNA
catcattggcgcatgggcag

SEQ ID NO: 1712 - DNA, 20 bp, synthetic construct
  source 1..20: mol_type = other DNA
ggtggccaccgcgggactcc

SEQ ID NO: 1713 - DNA, 20 bp, synthetic construct
  source 1..20: mol_type = other DNA
ccgccgccgttgccgttgct

SEQ ID NO: 1714 - DNA, 20 bp, synthetic construct
  source 1..20: mol_type = other DNA
gtacttttctcatgtgcggc

SEQ ID NO: 1715 - DNA, 20 bp, synthetic construct
  source 1..20: mol_type = other DNA
ctcctatcatcattttccag

SEQ ID NO: 1716 - DNA, 20 bp, synthetic construct
  source 1..20: mol_type = other DNA
tctgaaccagaattcgggtt

SEQ ID NO: 1717 - DNA, 20 bp, synthetic construct
  source 1..20: mol_type = other DNA
gcacttggttcaattttgtc

SEQ ID NO: 1718 - DNA, 20 bp, synthetic construct
  source 1..20: mol_type = other DNA
gctggaagtctgaacccctt

SEQ ID NO: 1719 - DNA, 20 bp, synthetic construct
  source 1..20: mol_type = other DNA
ggatgttacaagaaatcaac

SEQ ID NO: 1720 - DNA, 20 bp, synthetic construct
  source 1..20: mol_type = other DNA
caagggttattaaaaaataa

SEQ ID NO: 1721 - DNA, 20 bp, synthetic construct
  source 1..20: mol_type = other DNA
aataataatccgtcagtttg

SEQ ID NO: 1722 - DNA, 20 bp, synthetic construct
  source 1..20: mol_type = other DNA
actccccaccccttcccttc

SEQ ID NO: 1723 - DNA, 20 bp, synthetic construct
  source 1..20: mol_type = other DNA
cccccagcccctactacaac

SEQ ID NO: 1724 - DNA, 20 bp, synthetic construct
  source 1..20: mol_type = other DNA
atcactaaaagaaaaatatt

SEQ ID NO: 1725 - DNA, 20 bp, synthetic construct
  source 1..20: mol_type = other DNA
ataaactgtttacatctccg

SEQ ID NO: 1726 - DNA, 20 bp, synthetic construct
  source 1..20: mol_type = other DNA
aaggccatcctgggcaacag

SEQ ID NO: 1727 - DNA, 20 bp, synthetic construct
  source 1..20: mol_type = other DNA
gagtctcactctgctctgtg

SEQ ID NO: 1728 - DNA, 20 bp, synthetic construct
  source 1..20: mol_type = other DNA
aaaacagtgaaccatgattc

SEQ ID NO: 1729 - DNA, 20 bp, synthetic construct
  source 1..20: mol_type = other DNA
tgctcccccaatgtccaccg

SEQ ID NO: 1730 - DNA, 20 bp, synthetic construct
  source 1..20: mol_type = other DNA
ttatgttacatctgccaaca

SEQ ID NO: 1731 - DNA, 20 bp, synthetic construct
  source 1..20: mol_type = other DNA
ttttctgaaatgttttatat

SEQ ID NO: 1732 - DNA, 20 bp, synthetic construct
  source 1..20: mol_type = other DNA
aatctttttattcttgtaat

SEQ ID NO: 1733 - DNA, 20 bp, synthetic construct
  source 1..20: mol_type = other DNA
agaaagttttaaaaattagg

SEQ ID NO: 1734 - DNA, 20 bp, synthetic construct
  source 1..20: mol_type = other DNA
tgtccttcagtagtttctaa

SEQ ID NO: 1735 - DNA, 20 bp, synthetic construct
  source 1..20: mol_type = other DNA
tttaagtaatgctttatatt

SEQ ID NO: 1736 - DNA, 20 bp, synthetic construct
  source 1..20: mol_type = other DNA
tgtttaagtaaaatgttttt

SEQ ID NO: 1737 - DNA, 20 bp, synthetic construct
  source 1..20: mol_type = other DNA
tgaggtatccagagttacta

SEQ ID NO: 1738 - DNA, 20 bp, synthetic construct
  source 1..20: mol_type = other DNA
aaataataataatacagaag

SEQ ID NO: 1739 - DNA, 20 bp, synthetic construct
  source 1..20: mol_type = other DNA
cacgactggtcgatccctag

SEQ ID NO: 1740 - DNA, 20 bp, synthetic construct
  source 1..20: mol_type = other DNA
tcattaaaaaaacacatata

SEQ ID NO: 1741 - DNA, 20 bp, synthetic construct
  source 1..20: mol_type = other DNA
ctaataacttacaacaactg

SEQ ID NO: 1742 - DNA, 20 bp, synthetic construct
  source 1..20: mol_type = other DNA
cccacctctttttgcataac

SEQ ID NO: 1743 - DNA, 20 bp, synthetic construct
  source 1..20: mol_type = other DNA
tatagaagagggcaatttct

SEQ ID NO: 1744 - DNA, 20 bp, synthetic construct
  source 1..20: mol_type = other DNA
gaaggaaaaaaatagaggag

SEQ ID NO: 1745 - DNA, 20 bp, synthetic construct
  source 1..20: mol_type = other DNA
aataataaagacagtatcac

SEQ ID NO: 1746 - DNA, 20 bp, synthetic construct
  source 1..20: mol_type = other DNA
aataattccattcaaagtat

SEQ ID NO: 1747 - DNA, 20 bp, synthetic construct
  source 1..20: mol_type = other DNA
taaaatgaaattaattccaa

SEQ ID NO: 1748 - DNA, 20 bp, synthetic construct
  source 1..20: mol_type = other DNA
gataaagtgagataaaatag

SEQ ID NO: 1749 - DNA, 20 bp, synthetic construct
  source 1..20: mol_type = other DNA
taaatccaggagtaaaagaa

SEQ ID NO: 1750 - DNA, 20 bp, synthetic construct
  source 1..20: mol_type = other DNA
actgagttctataggtgctt

SEQ ID NO: 1751 - DNA, 20 bp, synthetic construct
  source 1..20: mol_type = other DNA
caaagttctaaggaacaaaa

SEQ ID NO: 1752 - DNA, 20 bp, synthetic construct
  source 1..20: mol_type = other DNA
gcaagatctgggtatccatt

SEQ ID NO: 1753 - DNA, 20 bp, synthetic construct
  source 1..20: mol_type = other DNA
ctctagttgggagttagact

SEQ ID NO: 1754 - DNA, 20 bp, synthetic construct
  source 1..20: mol_type = other DNA
ggcttaaaatgtcctacttc

SEQ ID NO: 1755 - DNA, 20 bp, synthetic construct
  source 1..20: mol_type = other DNA
acatccagtaaaaagtaaat

SEQ ID NO: 1756 - DNA, 20 bp, synthetic construct
  source 1..20: mol_type = other DNA
atgggcatggtagcacgcgc

SEQ ID NO: 1757 - DNA, 20 bp, synthetic construct
  source 1..20: mol_type = other DNA
caattagctgcacaaacgga

SEQ ID NO: 1758 - DNA, 20 bp, synthetic construct
  source 1..20: mol_type = other DNA
cagtgagcaaagaaatttca

SEQ ID NO: 1759 - DNA, 20 bp, synthetic construct
  source 1..20: mol_type = other DNA
taattatcaggcagagataa

SEQ ID NO: 1760 - DNA, 20 bp, synthetic construct
  source 1..20: mol_type = other DNA
acactttactcactgcgaaa

SEQ ID NO: 1761 - DNA, 20 bp, synthetic construct
  source 1..20: mol_type = other DNA
aactgccatttttccaatta

SEQ ID NO: 1762 - DNA, 20 bp, synthetic construct
  source 1..20: mol_type = other DNA
tgaggaaaggctacctttgc

SEQ ID NO: 1763 - DNA, 20 bp, synthetic construct
  source 1..20: mol_type = other DNA
gaatttgccccaaataagcc

SEQ ID NO: 1764 - DNA, 20 bp, synthetic construct
  source 1..20: mol_type = other DNA
gctaactgaaaaagtacagc

SEQ ID NO: 1765 - DNA, 20 bp, synthetic construct
  source 1..20: mol_type = other DNA
ttgttctaatgctatattgc

SEQ ID NO: 1766 - DNA, 20 bp, synthetic construct
  source 1..20: mol_type = other DNA
gctggtaacgatgtggataa

SEQ ID NO: 1767 - DNA, 20 bp, synthetic construct
  source 1..20: mol_type = other DNA
agttaaaatcatatcaacta

SEQ ID NO: 1768 - DNA, 20 bp, synthetic construct
  source 1..20: mol_type = other DNA
aaagtggaaaaattcaattg

SEQ ID NO: 1769 - DNA, 20 bp, synthetic construct
  source 1..20: mol_type = other DNA
ttgaacaactatccacacaa

SEQ ID NO: 1770 - DNA, 20 bp, synthetic construct
  source 1..20: mol_type = other DNA
taagggcaatgtataaagta

SEQ ID NO: 1771 - DNA, 20 bp, synthetic construct
  source 1..20: mol_type = other DNA
gttacagtaccctgtgaaga

SEQ ID NO: 1772 - DNA, 20 bp, synthetic construct
  source 1..20: mol_type = other DNA
aaaatgaaaactttatgtca

SEQ ID NO: 1773 - DNA, 20 bp, synthetic construct
  source 1..20: mol_type = other DNA
cctggaccactactctcatc

SEQ ID NO: 1774 - DNA, 20 bp, synthetic construct
  source 1..20: mol_type = other DNA
agcaggcacaaaactgatac

SEQ ID NO: 1775 - DNA, 20 bp, synthetic construct
  source 1..20: mol_type = other DNA
acacaccaaaaaaattaagg

SEQ ID NO: 1776 - DNA, 20 bp, synthetic construct
  source 1..20: mol_type = other DNA
agaacttgttcataaaatcc

SEQ ID NO: 1777 - DNA, 20 bp, synthetic construct
  source 1..20: mol_type = other DNA
ccctcagatcaagtagtgaa

SEQ ID NO: 1778 - DNA, 20 bp, synthetic construct
  source 1..20: mol_type = other DNA
gcaatggaaattttagctta

SEQ ID NO: 1779 - DNA, 20 bp, synthetic construct
  source 1..20: mol_type = other DNA
atctagtaatggatccaaaa

SEQ ID NO: 1780 - DNA, 20 bp, synthetic construct
  source 1..20: mol_type = other DNA
aatccttaatatcctctaga

SEQ ID NO: 1781 - DNA, 20 bp, synthetic construct
  source 1..20: mol_type = other DNA
tgaaatatttttactatgca

SEQ ID NO: 1782 - DNA, 20 bp, synthetic construct
  source 1..20: mol_type = other DNA
attccaaaatagttccccac

SEQ ID NO: 1783 - DNA, 20 bp, synthetic construct
  source 1..20: mol_type = other DNA
taaagtcaaaaaagactact

SEQ ID NO: 1784 - DNA, 20 bp, synthetic construct
  source 1..20: mol_type = other DNA
ctcttatgaagctgactcca

SEQ ID NO: 1785 - DNA, 20 bp, synthetic construct
  source 1..20: mol_type = other DNA
tacactcaaagccagtccat

SEQ ID NO: 1786 - DNA, 20 bp, synthetic construct
  source 1..20: mol_type = other DNA
gactcggtggccaccgcggg

SEQ ID NO: 1787 - DNA, 20 bp, synthetic construct
  source 1..20: mol_type = other DNA
acgcgccgccgccgttgccg

SEQ ID NO: 1788 - DNA, 20 bp, synthetic construct
  source 1..20: mol_type = other DNA
ctgtacttttctcatgtgcg

SEQ ID NO: 1789 - DNA, 20 bp, synthetic construct
  source 1..20: mol_type = other DNA
actcctatcatcattttcca

SEQ ID NO: 1790 - DNA, 20 bp, synthetic construct
  source 1..20: mol_type = other DNA
ggtctgaaccagaattcggg

SEQ ID NO: 1791 - DNA, 20 bp, synthetic construct
  source 1..20: mol_type = other DNA
tagcacttggttcaattttg

SEQ ID NO: 1792 - DNA, 20 bp, synthetic construct
  source 1..20: mol_type = other DNA
gggctggaagtctgaacccc

SEQ ID NO: 1793 - DNA, 20 bp, synthetic construct
  source 1..20: mol_type = other DNA
agcatcattggcgcatgggc

SEQ ID NO: 1794 - DNA, 20 bp, synthetic construct
  source 1..20: mol_type = other DNA
ttagcattcctattggatgt

SEQ ID NO: 1795 - DNA, 20 bp, synthetic construct
  source 1..20: mol_type = other DNA
actttcaagggttattaaaa

SEQ ID NO: 1796 - DNA, 20 bp, synthetic construct
  source 1..20: mol_type = other DNA
cttgatttataaataataat

SEQ ID NO: 1797 - DNA, 20 bp, synthetic construct
  source 1..20: mol_type = other DNA
cgggcactccccaccccttc

SEQ ID NO: 1798 - DNA, 20 bp, synthetic construct
  source 1..20: mol_type = other DNA
cgtttccttctccctttgaa

SEQ ID NO: 1799 - DNA, 20 bp, synthetic construct
  source 1..20: mol_type = other DNA
taggcccttctacaagatat

SEQ ID NO: 1800 - DNA, 20 bp, synthetic construct
  source 1..20: mol_type = other DNA
tggtggtgtgcgcatgtaga

SEQ ID NO: 1801 - DNA, 20 bp, synthetic construct
  source 1..20: mol_type = other DNA
aattcaaggccatcctgggc

SEQ ID NO: 1802 - DNA, 20 bp, synthetic construct
  source 1..20: mol_type = other DNA
tcttccaaactttttttttt

SEQ ID NO: 1803 - DNA, 20 bp, synthetic construct
  source 1..20: mol_type = other DNA
gaagagtgaaccatggccag

SEQ ID NO: 1804 - DNA, 20 bp, synthetic construct
  source 1..20: mol_type = other DNA
agcaacccgaccacagctgg

SEQ ID NO: 1805 - DNA, 20 bp, synthetic construct
  source 1..20: mol_type = other DNA
gctgtatttttactcacctt

SEQ ID NO: 1806 - DNA, 20 bp, synthetic construct
  source 1..20: mol_type = other DNA
aatgttcatcttttcacatc

SEQ ID NO: 1807 - DNA, 20 bp, synthetic construct
  source 1..20: mol_type = other DNA
tcataatctcaaatgcaagc

SEQ ID NO: 1808 - DNA, 20 bp, synthetic construct
  source 1..20: mol_type = other DNA
ctgggaggccaaggtgagtc

SEQ ID NO: 1809 - DNA, 20 bp, synthetic construct
  source 1..20: mol_type = other DNA
ataattatagagcttcatgt

SEQ ID NO: 1810 - DNA, 20 bp, synthetic construct
  source 1..20: mol_type = other DNA
aactgctggatagcattaaa

SEQ ID NO: 1811 - DNA, 20 bp, synthetic construct
  source 1..20: mol_type = other DNA
taaaagtctaaaattatgtt

SEQ ID NO: 1812 - DNA, 20 bp, synthetic construct
  source 1..20: mol_type = other DNA
gggaagaaggatagaacact

SEQ ID NO: 1813 - DNA, 20 bp, synthetic construct
  source 1..20: mol_type = other DNA
gcattggtgacagagcaaaa

SEQ ID NO: 1814 - DNA, 20 bp, synthetic construct
  source 1..20: mol_type = other DNA
attcagatccaaaaagtcta

SEQ ID NO: 1815 - DNA, 20 bp, synthetic construct
  source 1..20: mol_type = other DNA
tgtacattttatacagagtc

SEQ ID NO: 1816 - DNA, 20 bp, synthetic construct
  source 1..20: mol_type = other DNA
gcagtttatccccaataatc

SEQ ID NO: 1817 - DNA, 20 bp, synthetic construct
  source 1..20: mol_type = other DNA
atctttgcttgaataaatct

SEQ ID NO: 1818 - DNA, 20 bp, synthetic construct
  source 1..20: mol_type = other DNA
cttttatagaagagggcaat

SEQ ID NO: 1819 - DNA, 20 bp, synthetic construct
  source 1..20: mol_type = other DNA
aaatgaaggaaaaaaataga

SEQ ID NO: 1820 - DNA, 20 bp, synthetic construct
  source 1..20: mol_type = other DNA
ataaataataaagacagtat

SEQ ID NO: 1821 - DNA, 20 bp, synthetic construct
  source 1..20: mol_type = other DNA
tctttagagatttatttgag

SEQ ID NO: 1822 - DNA, 20 bp, synthetic construct
  source 1..20: mol_type = other DNA
tcaaacctatggcaaaagtg

SEQ ID NO: 1823 - DNA, 20 bp, synthetic construct
  source 1..20: mol_type = other DNA
ttatggtgagctacgatggc

SEQ ID NO: 1824 - DNA, 20 bp, synthetic construct
  source 1..20: mol_type = other DNA
gtgggcttggttttgaaaaa

SEQ ID NO: 1825 - DNA, 20 bp, synthetic construct
  source 1..20: mol_type = other DNA
aataataatttgagataccc

SEQ ID NO: 1826 - DNA, 20 bp, synthetic construct
  source 1..20: mol_type = other DNA
cttttagaatcgaatacaat

SEQ ID NO: 1827 - DNA, 20 bp, synthetic construct
  source 1..20: mol_type = other DNA
cattgcatcattagctagaa

SEQ ID NO: 1828 - DNA, 20 bp, synthetic construct
  source 1..20: mol_type = other DNA
gcacaggaaattttctctag

SEQ ID NO: 1829 - DNA, 20 bp, synthetic construct
  source 1..20: mol_type = other DNA
caaccttttcttcagacaag

SEQ ID NO: 1830 - DNA, 20 bp, synthetic construct
  source 1..20: mol_type = other DNA
ttacttaagtaatgtatgcc

SEQ ID NO: 1831 - DNA, 20 bp, synthetic construct
  source 1..20: mol_type = other DNA
ttctgttaccttttctccag

SEQ ID NO: 1832 - DNA, 20 bp, synthetic construct
  source 1..20: mol_type = other DNA
acctcaaactgaaccgccag

SEQ ID NO: 1833 - DNA, 20 bp, synthetic construct
  source 1..20: mol_type = other DNA
gtatcatatatttctcagcc

SEQ ID NO: 1834 - DNA, 20 bp, synthetic construct
  source 1..20: mol_type = other DNA
aaagaagcataattatcagg

SEQ ID NO: 1835 - DNA, 20 bp, synthetic construct
  source 1..20: mol_type = other DNA
ttaacactttactcactgcg

SEQ ID NO: 1836 - DNA, 20 bp, synthetic construct
  source 1..20: mol_type = other DNA
gtttgtatcccatatgactt

SEQ ID NO: 1837 - DNA, 20 bp, synthetic construct
  source 1..20: mol_type = other DNA
aaagctaaaacacaggctga

SEQ ID NO: 1838 - DNA, 20 bp, synthetic construct
  source 1..20: mol_type = other DNA
tcaaggaatattagtcagtc

SEQ ID NO: 1839 - DNA, 20 bp, synthetic construct
  source 1..20: mol_type = other DNA
aagactttttatgttgctcc

SEQ ID NO: 1840 - DNA, 20 bp, synthetic construct
  source 1..20: mol_type = other DNA
tattgccatcttacaaatag

SEQ ID NO: 1841 - DNA, 20 bp, synthetic construct
  source 1..20: mol_type = other DNA
tggtggcaggaggcaggaga

SEQ ID NO: 1842 - DNA, 20 bp, synthetic construct
  source 1..20: mol_type = other DNA
atgtgacggcatgtgcctgt

SEQ ID NO: 1843 - DNA, 20 bp, synthetic construct
  source 1..20: mol_type = other DNA
tcccaaagtggaaaaattca

SEQ ID NO: 1844 - DNA, 20 bp, synthetic construct
  source 1..20: mol_type = other DNA
gccaaacagaaccttccagt

SEQ ID NO: 1845 - DNA, 20 bp, synthetic construct
  source 1..20: mol_type = other DNA
cttgtttttctagccctggg

SEQ ID NO: 1846 - DNA, 20 bp, synthetic construct
  source 1..20: mol_type = other DNA
cagctatttttaagaaactg

SEQ ID NO: 1847 - DNA, 20 bp, synthetic construct
  source 1..20: mol_type = other DNA
ttccaaggctaaaaaaaaaa

SEQ ID NO: 1848 - DNA, 20 bp, synthetic construct
  source 1..20: mol_type = other DNA
ggacaacggatatccacaag

SEQ ID NO: 1849 - DNA, 20 bp, synthetic construct
  source 1..20: mol_type = other DNA
ttaaaatataactcacaaca

SEQ ID NO: 1850 - DNA, 20 bp, synthetic construct
  source 1..20: mol_type = other DNA
atcatcaatggctgctaaaa

SEQ ID NO: 1851 - DNA, 20 bp, synthetic construct
  source 1..20: mol_type = other DNA
gaatgactgcttacaactag

SEQ ID NO: 1852 - DNA, 20 bp, synthetic construct
  source 1..20: mol_type = other DNA
tgtaatgccagtgaccctca

SEQ ID NO: 1853 - DNA, 20 bp, synthetic construct
  source 1..20: mol_type = other DNA
tgaaaatcatctgtacctca

SEQ ID NO: 1854 - DNA, 20 bp, synthetic construct
  source 1..20: mol_type = other DNA
gtaccaaaataaaactattt

SEQ ID NO: 1855 - DNA, 20 bp, synthetic construct
  source 1..20: mol_type = other DNA
tttcctagcaccaaataaat

SEQ ID NO: 1856 - DNA, 20 bp, synthetic construct
  source 1..20: mol_type = other DNA
tttgaaatttcacttttaaa

SEQ ID NO: 1857 - DNA, 20 bp, synthetic construct
  source 1..20: mol_type = other DNA
agcccatacacagaaatgat

SEQ ID NO: 1858 - DNA, 20 bp, synthetic construct
  source 1..20: mol_type = other DNA
atacatactaaagtcaaaaa

SEQ ID NO: 1859 - DNA, 20 bp, synthetic construct
  source 1..20: mol_type = other DNA
tacatgtaagttcacatgcc

SEQ ID NO: 1860 - DNA, 20 bp, synthetic construct
  source 1..20: mol_type = other DNA
attcgcttttccccctccca

SEQ ID NO: 1861 - DNA, 20 bp, synthetic construct
  source 1..20: mol_type = other DNA
ttctgtacttttctcatgtg

SEQ ID NO: 1862 - DNA, 20 bp, synthetic construct
  source 1..20: mol_type = other DNA
ggcgagactcggtggccacc

SEQ ID NO: 1863 - DNA, 20 bp, synthetic construct
  source 1..20: mol_type = other DNA
ccgaaacgcgccgccgccgt

SEQ ID NO: 1864 - DNA, 20 bp, synthetic construct
  source 1..20: mol_type = other DNA
tttttcttcctcactcctat

SEQ ID NO: 1865 - DNA, 20 bp, synthetic construct
  source 1..20: mol_type = other DNA
gccagggaacacctccatta

SEQ ID NO: 1866 - DNA, 20 bp, synthetic construct
  source 1..20: mol_type = other DNA
ttagcacttggttcaatttt

SEQ ID NO: 1867 - DNA, 20 bp, synthetic construct
  source 1..20: mol_type = other DNA
tgggctggaagtctgaaccc

SEQ ID NO: 1868 - DNA, 20 bp, synthetic construct
  source 1..20: mol_type = other DNA
tagcatcattggcgcatggg

SEQ ID NO: 1869 - DNA, 20 bp, synthetic construct
  source 1..20: mol_type = other DNA
aactgttagcattcctattg

SEQ ID NO: 1870 - DNA, 20 bp, synthetic construct
  source 1..20: mol_type = other DNA
tcatgactttcaagggttat

SEQ ID NO: 1871 - DNA, 20 bp, synthetic construct
  source 1..20: mol_type = other DNA
tcaaacttgatttataaata

SEQ ID NO: 1872 - DNA, 20 bp, synthetic construct
  source 1..20: mol_type = other DNA
aaggaggaaggccgggacgg

SEQ ID NO: 1873 - DNA, 20 bp, synthetic construct
  source 1..20: mol_type = other DNA
tggtaagctctggcggcact

SEQ ID NO: 1874 - DNA, 20 bp, synthetic construct
  source 1..20: mol_type = other DNA
ttaggcccttctacaagata

SEQ ID NO: 1875 - DNA, 20 bp, synthetic construct
  source 1..20: mol_type = other DNA
aaaaacacaagtactttcat

SEQ ID NO: 1876 - DNA, 20 bp, synthetic construct
  source 1..20: mol_type = other DNA
aagatcctgcaacacacaca

SEQ ID NO: 1877 - DNA, 20 bp, synthetic construct
  source 1..20: mol_type = other DNA
cagtcttccaaacttttttt

SEQ ID NO: 1878 - DNA, 20 bp, synthetic construct
  source 1..20: mol_type = other DNA
catagagcttaaattttagt

SEQ ID NO: 1879 - DNA, 20 bp, synthetic construct
  source 1..20: mol_type = other DNA
ccccagcaacccgaccacag

SEQ ID NO: 1880 - DNA, 20 bp, synthetic construct
  source 1..20: mol_type = other DNA
actgataaatgactcatccc

SEQ ID NO: 1881 - DNA, 20 bp, synthetic construct
  source 1..20: mol_type = other DNA
attacctaaataaaatgttc

SEQ ID NO: 1882 - DNA, 20 bp, synthetic construct
  source 1..20: mol_type = other DNA
taattgtaaagtccctgctc

SEQ ID NO: 1883 - DNA, 20 bp, synthetic construct
  source 1..20: mol_type = other DNA
aaaaaaggccagtcgcagtg

SEQ ID NO: 1884 - DNA, 20 bp, synthetic construct
  source 1..20: mol_type = other DNA
caatataattatagagcttc

SEQ ID NO: 1885 - DNA, 20 bp, synthetic construct
  source 1..20: mol_type = other DNA
gcataagacaccatgcctag

SEQ ID NO: 1886 - DNA, 20 bp, synthetic construct
  source 1..20: mol_type = other DNA
tcatgtctctcatatgttta

SEQ ID NO: 1887 - DNA, 20 bp, synthetic construct
  source 1..20: mol_type = other DNA
tagagtgatggtaggcatac

SEQ ID NO: 1888 - DNA, 20 bp, synthetic construct
  source 1..20: mol_type = other DNA
ccccgctacttggtagggtg

SEQ ID NO: 1889 - DNA, 20 bp, synthetic construct
  source 1..20: mol_type = other DNA
ttttaataaaataatcacaa

SEQ ID NO: 1890 - DNA, 20 bp, synthetic construct
  source 1..20: mol_type = other DNA
gcatgagtcaattaaacctc

SEQ ID NO: 1891 - DNA, 20 bp, synthetic construct
  source 1..20: mol_type = other DNA
ttttaacttcatggaattac

SEQ ID NO: 1892 - DNA, 20 bp, synthetic construct
  source 1..20: mol_type = other DNA
aaaaaagtttgtaagatcac

SEQ ID NO: 1893 - DNA, 20 bp, synthetic construct
  source 1..20: mol_type = other DNA
tggttttctccatactgata

SEQ ID NO: 1894 - DNA, 20 bp, synthetic construct
  source 1..20: mol_type = other DNA
gttggagtaaagaggaaaac

SEQ ID NO: 1895 - DNA, 20 bp, synthetic construct
  source 1..20: mol_type = other DNA
ggcactgaatttcatttatt

SEQ ID NO: 1896 - DNA, 20 bp, synthetic construct
  source 1..20: mol_type = other DNA
cggctggagtgcaatctcag

SEQ ID NO: 1897 - DNA, 20 bp, synthetic construct
  source 1..20: mol_type = other DNA
acagaatttaggaattgaaa

SEQ ID NO: 1898 - DNA, 20 bp, synthetic construct
  source 1..20: mol_type = other DNA
aaaatgtaaattgattgtag

SEQ ID NO: 1899 - DNA, 20 bp, synthetic construct
  source 1..20: mol_type = other DNA
aataaaaacaaaccacaatg

SEQ ID NO: 1900 - DNA, 20 bp, synthetic construct
  source 1..20: mol_type = other DNA
caaaaatatatatacataaa

SEQ ID NO: 1901 - DNA, 20 bp, synthetic construct
  source 1..20: mol_type = other DNA
atacaattcccagcatttcc

SEQ ID NO: 1902 - DNA, 20 bp, synthetic construct
  source 1..20: mol_type = other DNA
catcaggatgctgagaaaat

SEQ ID NO: 1903 - DNA, 20 bp, synthetic construct
  source 1..20: mol_type = other DNA
agtactgacttatgaaagca

SEQ ID NO: 1904 - DNA, 20 bp, synthetic construct
  source 1..20: mol_type = other DNA
ctttaattccaatgtaacct

SEQ ID NO: 1905 - DNA, 20 bp, synthetic construct
  source 1..20: mol_type = other DNA
aatcacacttacttatggag

SEQ ID NO: 1906 - DNA, 20 bp, synthetic construct
  source 1..20: mol_type = other DNA
tttaaagccacagtttatgt

SEQ ID NO: 1907 - DNA, 20 bp, synthetic construct
  source 1..20: mol_type = other DNA
aatatcggcaatgctgatga

SEQ ID NO: 1908 - DNA, 20 bp, synthetic construct
  source 1..20: mol_type = other DNA
aagtatcatatatttctcag

SEQ ID NO: 1909 - DNA, 20 bp, synthetic construct
  source 1..20: mol_type = other DNA
ttcaagactggctgaagaaa

SEQ ID NO: 1910 - DNA, 20 bp, synthetic construct
  source 1..20: mol_type = other DNA
acaaaactttatagttttac

SEQ ID NO: 1911 - DNA, 20 bp, synthetic construct
  source 1..20: mol_type = other DNA
ggaatttgctggcaatcaaa

SEQ ID NO: 1912 - DNA, 20 bp, synthetic construct
  source 1..20: mol_type = other DNA
aataagtcaagaatgaagct

SEQ ID NO: 1913 - DNA, 20 bp, synthetic construct
  source 1..20: mol_type = other DNA
aaaatgtggtattatccaca

SEQ ID NO: 1914 - DNA, 20 bp, synthetic construct
  source 1..20: mol_type = other DNA
aggcacctaaaagtagtaag

SEQ ID NO: 1915 - DNA, 20 bp, synthetic construct
  source 1..20: mol_type = other DNA
acagccctatttgatgtaga

SEQ ID NO: 1916 - DNA, 20 bp, synthetic construct
  source 1..20: mol_type = other DNA
aatataaaaggcactcaagc

SEQ ID NO: 1917 - DNA, 20 bp, synthetic construct
  source 1..20: mol_type = other DNA
gccatatgtgacggcatgtg

SEQ ID NO: 1918 - DNA, 20 bp, synthetic construct
  source 1..20: mol_type = other DNA
cctcaccaaatgaactaaaa

SEQ ID NO: 1919 - DNA, 20 bp, synthetic construct
  source 1..20: mol_type = other DNA
atattggtcagttagacatt

SEQ ID NO: 1920 - DNA, 20 bp, synthetic construct
  source 1..20: mol_type = other DNA
acattaactaaaacacagtt

SEQ ID NO: 1921 - DNA, 20 bp, synthetic construct
  source 1..20: mol_type = other DNA
aacttaaaactttgtcaatt

SEQ ID NO: 1922 - DNA, 20 bp, synthetic construct
  source 1..20: mol_type = other DNA
ctctataatttgattacatt

SEQ ID NO: 1923 - DNA, 20 bp, synthetic construct
  source 1..20: mol_type = other DNA
ttttcaacaaatgaggtggg

SEQ ID NO: 1924 - DNA, 20 bp, synthetic construct
  source 1..20: mol_type = other DNA
tgaaagtttttaaaatataa

SEQ ID NO: 1925 - DNA, 20 bp, synthetic construct
  source 1..20: mol_type = other DNA
tatcatcaatggctgctaaa

SEQ ID NO: 1926 - DNA, 20 bp, synthetic construct
  source 1..20: mol_type = other DNA
tttctggtgtggcattaacc

SEQ ID NO: 1927 - DNA, 20 bp, synthetic construct
  source 1..20: mol_type = other DNA
tgcttattattctcacatat

SEQ ID NO: 1928 - DNA, 20 bp, synthetic construct
  source 1..20: mol_type = other DNA
gttcattccagatttcactg

SEQ ID NO: 1929 - DNA, 20 bp, synthetic construct
  source 1..20: mol_type = other DNA
agtaaaaggaataaaatcat

SEQ ID NO: 1930 - DNA, 20 bp, synthetic construct
  source 1..20: mol_type = other DNA
agagcatctattaaaggatt

SEQ ID NO: 1931 - DNA, 20 bp, synthetic construct
  source 1..20: mol_type = other DNA
cggaatctcagaggtttttg

SEQ ID NO: 1932 - DNA, 20 bp, synthetic construct
  source 1..20: mol_type = other DNA
ccctcaagataataagccca

SEQ ID NO: 1933 - DNA, 20 bp, synthetic construct
  source 1..20: mol_type = other DNA
gtacaggagaatgtacaggg

SEQ ID NO: 1934 - DNA, 20 bp, synthetic construct
  source 1..20: mol_type = other DNA
aatgccgtttttactctcac

SEQ ID NO: 1935 - DNA, 20 bp, synthetic construct
  source 1..20: mol_type = other DNA
acaaaactcaaaattgaatt

SEQ ID NO: 1936 - DNA, 20 bp, synthetic construct
  source 1..20: mol_type = other DNA
gattctgtacttttctcatg

SEQ ID NO: 1937 - DNA, 20 bp, synthetic construct
  source 1..20: mol_type = other DNA
gaagcggcgagactcggtgg

SEQ ID NO: 1938 - DNA, 20 bp, synthetic construct
  source 1..20: mol_type = other DNA
ccgggccgaaacgcgccgcc

SEQ ID NO: 1939 - DNA, 20 bp, synthetic construct
  source 1..20: mol_type = other DNA
atttttcttcctcactccta

SEQ ID NO: 1940 - DNA, 20 bp, synthetic construct
  source 1..20: mol_type = other DNA
caaattctaggccactggat

SEQ ID NO: 1941 - DNA, 20 bp, synthetic construct
  source 1..20: mol_type = other DNA
cttagcacttggttcaattt

SEQ ID NO: 1942 - DNA, 20 bp, synthetic construct
  source 1..20: mol_type = other DNA
ctgggctggaagtctgaacc

SEQ ID NO: 1943 - DNA, 20 bp, synthetic construct
  source 1..20: mol_type = other DNA
ttagcatcattggcgcatgg

SEQ ID NO: 1944 - DNA, 20 bp, synthetic construct
  source 1..20: mol_type = other DNA
aagtgaactgttagcattcc

SEQ ID NO: 1945 - DNA, 20 bp, synthetic construct
  source 1..20: mol_type = other DNA
tgtgttcatgactttcaagg

SEQ ID NO: 1946 - DNA, 20 bp, synthetic construct
  source 1..20: mol_type = other DNA
cctcatcaaacttgatttat

SEQ ID NO: 1947 - DNA, 20 bp, synthetic construct
  source 1..20: mol_type = other DNA
cgccggagaggtctggcggg

SEQ ID NO: 1948 - DNA, 20 bp, synthetic construct
  source 1..20: mol_type = other DNA
aagtagtgtttgggatgctt

SEQ ID NO: 1949 - DNA, 20 bp, synthetic construct
  source 1..20: mol_type = other DNA
aaaccccatgtacatagatg

SEQ ID NO: 1950 - DNA, 20 bp, synthetic construct
  source 1..20: mol_type = other DNA
ttcgagatgagcctaaccaa

SEQ ID NO: 1951 - DNA, 20 bp, synthetic construct
  source 1..20: mol_type = other DNA
tacttaaaatgcataaaaaa

SEQ ID NO: 1952 - DNA, 20 bp, synthetic construct
  source 1..20: mol_type = other DNA
taagtgaaccacctgcctca

SEQ ID NO: 1953 - DNA, 20 bp, synthetic construct
  source 1..20: mol_type = other DNA
cctgctttcatagagcttaa

SEQ ID NO: 1954 - DNA, 20 bp, synthetic construct
  source 1..20: mol_type = other DNA
atttcttcacccgtaaatag

SEQ ID NO: 1955 - DNA, 20 bp, synthetic construct
  source 1..20: mol_type = other DNA
cattggtcaacagttcacaa

SEQ ID NO: 1956 - DNA, 20 bp, synthetic construct
  source 1..20: mol_type = other DNA
ctaataggcacacaataaat

SEQ ID NO: 1957 - DNA, 20 bp, synthetic construct
  source 1..20: mol_type = other DNA
ttattacttgccaggcattg

SEQ ID NO: 1958 - DNA, 20 bp, synthetic construct
  source 1..20: mol_type = other DNA
tatgttattaagtgtttaat

SEQ ID NO: 1959 - DNA, 20 bp, synthetic construct
  source 1..20: mol_type = other DNA
ctgtcaccatacaatataat

SEQ ID NO: 1960 - DNA, 20 bp, synthetic construct
  source 1..20: mol_type = other DNA
ctgctagacaaattctgtaa

SEQ ID NO: 1961 - DNA, 20 bp, synthetic construct
  source 1..20: mol_type = other DNA
ttattaatttccttattttg

SEQ ID NO: 1962 - DNA, 20 bp, synthetic construct
  source 1..20: mol_type = other DNA
atgccaaaatcactgtgatt

SEQ ID NO: 1963 - DNA, 20 bp, synthetic construct
  source 1..20: mol_type = other DNA
gtcaaattaatataaagaaa

SEQ ID NO: 1964 - DNA, 20 bp, synthetic construct
  source 1..20: mol_type = other DNA
tctcataaacattagtcatg

SEQ ID NO: 1965 - DNA, 20 bp, synthetic construct
  source 1..20: mol_type = other DNA
cagcacttctctctcctgtc

SEQ ID NO: 1966 - DNA, 20 bp, synthetic construct
  source 1..20: mol_type = other DNA
aatgaattatattagactgg

SEQ ID NO: 1967 - DNA, 20 bp, synthetic construct
  source 1..20: mol_type = other DNA
tctttaaaaaaagtttgtaa

SEQ ID NO: 1968 - DNA, 20 bp, synthetic construct
  source 1..20: mol_type = other DNA
aaaaaaagaaggaaaccatg

SEQ ID NO: 1969 - DNA, 20 bp, synthetic construct
  source 1..20: mol_type = other DNA
caatggaataaggaaacaga

SEQ ID NO: 1970 - DNA, 20 bp, synthetic construct
  source 1..20: mol_type = other DNA
ttgtatttctccgtactgtc

SEQ ID NO: 1971 - DNA, 20 bp, synthetic construct
  source 1..20: mol_type = other DNA
tggagtcacccggctggagt

SEQ ID NO: 1972 - DNA, 20 bp, synthetic construct
  source 1..20: mol_type = other DNA
aagaatcaaaaaacagaatt

SEQ ID NO: 1973 - DNA, 20 bp, synthetic construct
  source 1..20: mol_type = other DNA
ttcagggtgatgaaaatgta

SEQ ID NO: 1974 - DNA, 20 bp, synthetic construct
  source 1..20: mol_type = other DNA
catacaaacataaattaatt

SEQ ID NO: 1975 - DNA, 20 bp, synthetic construct
  source 1..20: mol_type = other DNA
atctcaaaaatatatataca

SEQ ID NO: 1976 - DNA, 20 bp, synthetic construct
  source 1..20: mol_type = other DNA
tgcactcataagtctggacg

SEQ ID NO: 1977 - DNA, 20 bp, synthetic construct
  source 1..20: mol_type = other DNA
tggagagttagcacgaaatg

SEQ ID NO: 1978 - DNA, 20 bp, synthetic construct
  source 1..20: mol_type = other DNA
taatgttattgaagagtact

SEQ ID NO: 1979 - DNA, 20 bp, synthetic construct
  source 1..20: mol_type = other DNA
agaaatttatgtaatgcttt

SEQ ID NO: 1980 - DNA, 20 bp, synthetic construct
  source 1..20: mol_type = other DNA
atgggcaggaaatcacactt

SEQ ID NO: 1981 - DNA, 20 bp, synthetic construct
  source 1..20: mol_type = other DNA
ctttaaagccacagtttatg

SEQ ID NO: 1982 - DNA, 20 bp, synthetic construct
  source 1..20: mol_type = other DNA
tcatggctccaatatcggca

SEQ ID NO: 1983 - DNA, 20 bp, synthetic construct
  source 1..20: mol_type = other DNA
gggttccacacacttaagta

SEQ ID NO: 1984 - DNA, 20 bp, synthetic construct
  source 1..20: mol_type = other DNA
gtaaaatgaacctaagttca

SEQ ID NO: 1985 - DNA, 20 bp, synthetic construct
  source 1..20: mol_type = other DNA
tattagagaggtactttaca

SEQ ID NO: 1986 - DNA, 20 bp, synthetic construct
  source 1..20: mol_type = other DNA
cctctctagcccttaccctt

SEQ ID NO: 1987 - DNA, 20 bp, synthetic construct
  source 1..20: mol_type = other DNA
agctgaatagatacatgtgc

SEQ ID NO: 1988 - DNA, 20 bp, synthetic construct
  source 1..20: mol_type = other DNA
acgagaaaaaaactgcacac

SEQ ID NO: 1989 - DNA, 20 bp, synthetic construct
  source 1..20: mol_type = other DNA
ggctaaataatacatttggt

SEQ ID NO: 1990 - DNA, 20 bp, synthetic construct
  source 1..20: mol_type = other DNA
ggtctgactccgttgcccag

SEQ ID NO: 1991 - DNA, 20 bp, synthetic construct
  source 1..20: mol_type = other DNA
ataccccaaaagtacaggca

SEQ ID NO: 1992 - DNA, 20 bp, synthetic construct
  source 1..20: mol_type = other DNA
aaaatatcagccatatgtga

SEQ ID NO: 1993 - DNA, 20 bp, synthetic construct
  source 1..20: mol_type = other DNA
cacaagcatcaaggccatct

SEQ ID NO: 1994 - DNA, 20 bp, synthetic construct
  source 1..20: mol_type = other DNA
ttaggatgtggagggaccgt

SEQ ID NO: 1995 - DNA, 20 bp, synthetic construct
  source 1..20: mol_type = other DNA
tccatttaattaatatactg

SEQ ID NO: 1996 - DNA, 20 bp, synthetic construct
  source 1..20: mol_type = other DNA
tgtttcagtaggaacttaaa

SEQ ID NO: 1997 - DNA, 20 bp, synthetic construct
  source 1..20: mol_type = other DNA
agattaaactctataatttg

SEQ ID NO: 1998 - DNA, 20 bp, synthetic construct
  source 1..20: mol_type = other DNA
atttgtcaaaactcattaaa

SEQ ID NO: 1999 - DNA, 20 bp, synthetic construct
  source 1..20: mol_type = other DNA
caacatggtgattagatcat

SEQ ID NO: 2000 - DNA, 20 bp, synthetic construct
  source 1..20: mol_type = other DNA
agaaatattccaggcaataa

SEQ ID NO: 2001 - DNA, 20 bp, synthetic construct
  source 1..20: mol_type = other DNA
gaattcagctcaactgtcat

SEQ ID NO: 2002 - DNA, 20 bp, synthetic construct
  source 1..20: mol_type = other DNA
aagatgggtttttttgctta

SEQ ID NO: 2003 - DNA, 20 bp, synthetic construct
  source 1..20: mol_type = other DNA
agaaccggctctaatgacta

SEQ ID NO: 2004 - DNA, 20 bp, synthetic construct
  source 1..20: mol_type = other DNA
ggactaaaccggaagacact

SEQ ID NO: 2005 - DNA, 20 bp, synthetic construct
  source 1..20: mol_type = other DNA
gtttcccctttaatagtata

SEQ ID NO: 2006 - DNA, 20 bp, synthetic construct
  source 1..20: mol_type = other DNA
acagtacggaatctcagagg

SEQ ID NO: 2007 - DNA, 20 bp, synthetic construct
  source 1..20: mol_type = other DNA
gacagcacaccgatgataaa

SEQ ID NO: 2008 - DNA, 20 bp, synthetic construct
  source 1..20: mol_type = other DNA
ctaagctttgcacacttggg

SEQ ID NO: 2009 - DNA, 20 bp, synthetic construct
  source 1..20: mol_type = other DNA
gatgaaatgccgtttttact

SEQ ID NO: 2010 - DNA, 20 bp, synthetic construct
  source 1..20: mol_type = other DNA
agcacatgattgtaaactat

SEQ ID NO: 2011 - DNA, 20 bp, synthetic construct
  source 1..20: mol_type = other DNA
gcggcgaagcggcgagactc

SEQ ID NO: 2012 - DNA, 20 bp, synthetic construct
  source 1..20: mol_type = other DNA
aaggagccgccgggagccgg

SEQ ID NO: 2013 - DNA, 20 bp, synthetic construct
  source 1..20: mol_type = other DNA
cgtttcggccccgaactgga

SEQ ID NO: 2014 - DNA, 20 bp, synthetic construct
  source 1..20: mol_type = other DNA
tatttttcttcctcactcct

SEQ ID NO: 2015 - DNA, 20 bp, synthetic construct
  source 1..20: mol_type = other DNA
tacaaattctaggccactgg

SEQ ID NO: 2016 - DNA, 20 bp, synthetic construct
  source 1..20: mol_type = other DNA
tccttagcacttggttcaat

SEQ ID NO: 2017 - DNA, 20 bp, synthetic construct
  source 1..20: mol_type = other DNA
tgctgggctggaagtctgaa

SEQ ID NO: 2018 - DNA, 20 bp, synthetic construct
  source 1..20: mol_type = other DNA
cattagcatcattggcgcat

SEQ ID NO: 2019 - DNA, 20 bp, synthetic construct
  source 1..20: mol_type = other DNA
actgcaagtgaactgttagc

SEQ ID NO: 2020 - DNA, 20 bp, synthetic construct
  source 1..20: mol_type = other DNA
gctgatgtgttcatgacttt

SEQ ID NO: 2021 - DNA, 20 bp, synthetic construct
  source 1..20: mol_type = other DNA
gatcacctcatcaaacttga

SEQ ID NO: 2022 - DNA, 20 bp, synthetic construct
  source 1..20: mol_type = other DNA
ccgcgcgccggagaggtctg

SEQ ID NO: 2023 - DNA, 20 bp, synthetic construct
  source 1..20: mol_type = other DNA
aaagggaaactgaagttacc

SEQ ID NO: 2024 - DNA, 20 bp, synthetic construct
  source 1..20: mol_type = other DNA
cctttaatctgctttcttct

SEQ ID NO: 2025 - DNA, 20 bp, synthetic construct
  source 1..20: mol_type = other DNA
gtaggctgcgcacggtggct

SEQ ID NO: 2026 - DNA, 20 bp, synthetic construct
  source 1..20: mol_type = other DNA
aaaccaggccggacgcggtg

SEQ ID NO: 2027 - DNA, 20 bp, synthetic construct
  source 1..20: mol_type = other DNA
cttgtgtctgttttttagta

SEQ ID NO: 2028 - DNA, 20 bp, synthetic construct
  source 1..20: mol_type = other DNA
tcctgctttcatagagctta

SEQ ID NO: 2029 - DNA, 20 bp, synthetic construct
  source 1..20: mol_type = other DNA
cctcttggtctcaatttctt

SEQ ID NO: 2030 - DNA, 20 bp, synthetic construct
  source 1..20: mol_type = other DNA
ggtcagaggttaaaagtctt

SEQ ID NO: 2031 - DNA, 20 bp, synthetic construct
  source 1..20: mol_type = other DNA
cttggcacagctctcctgaa

SEQ ID NO: 2032 - DNA, 20 bp, synthetic construct
  source 1..20: mol_type = other DNA
aagaacagctaaaagttact

SEQ ID NO: 2033 - DNA, 20 bp, synthetic construct
  source 1..20: mol_type = other DNA
atacagatcgcatagcttaa

SEQ ID NO: 2034 - DNA, 20 bp, synthetic construct
  source 1..20: mol_type = other DNA
ctattggtactgtcaccata

SEQ ID NO: 2035 - DNA, 20 bp, synthetic construct
  source 1..20: mol_type = other DNA
atcagtatttactacttctg

SEQ ID NO: 2036 - DNA, 20 bp, synthetic construct
  source 1..20: mol_type = other DNA
acaattattaatttccttat

SEQ ID NO: 2037 - DNA, 20 bp, synthetic construct
  source 1..20: mol_type = other DNA
acagtcaggaaaagagacaa

SEQ ID NO: 2038 - DNA, 20 bp, synthetic construct
  source 1..20: mol_type = other DNA
aaaccaaatattttactatt

SEQ ID NO: 2039 - DNA, 20 bp, synthetic construct
  source 1..20: mol_type = other DNA
aatgttatatttctcataaa

SEQ ID NO: 2040 - DNA, 20 bp, synthetic construct
  source 1..20: mol_type = other DNA
gtttcccctacgctgctctc

SEQ ID NO: 2041 - DNA, 20 bp, synthetic construct
  source 1..20: mol_type = other DNA
cccacagatgcagaggacca

SEQ ID NO: 2042 - DNA, 20 bp, synthetic construct
  source 1..20: mol_type = other DNA
agcccagatatttctttaaa

SEQ ID NO: 2043 - DNA, 20 bp, synthetic construct
  source 1..20: mol_type = other DNA
gtactaagaatacaaacaaa

SEQ ID NO: 2044 - DNA, 20 bp, synthetic construct
  source 1..20: mol_type = other DNA
tttgctgacccctatcatct

SEQ ID NO: 2045 - DNA, 20 bp, synthetic construct
  source 1..20: mol_type = other DNA
acagtttcactaggttctca

SEQ ID NO: 2046 - DNA, 20 bp, synthetic construct
  source 1..20: mol_type = other DNA
tttctacaaaaacggatata

SEQ ID NO: 2047 - DNA, 20 bp, synthetic construct
  source 1..20: mol_type = other DNA
ctgtagaagaactaagacaa

SEQ ID NO: 2048 - DNA, 20 bp, synthetic construct
  source 1..20: mol_type = other DNA
tgtccagaatgggcaaacct

SEQ ID NO: 2049 - DNA, 20 bp, synthetic construct
  source 1..20: mol_type = other DNA
tgttttaactaagagtcagc

SEQ ID NO: 2050 - DNA, 20 bp, synthetic construct
  source 1..20: mol_type = other DNA
ggccagagcggataccatat

SEQ ID NO: 2051 - DNA, 20 bp, synthetic construct
  source 1..20: mol_type = other DNA
tatttagtcatttttagcac

SEQ ID NO: 2052 - DNA, 20 bp, synthetic construct
  source 1..20: mol_type = other DNA
aaaagtagctctttctaaag

SEQ ID NO: 2053 - DNA, 20 bp, synthetic construct
  source 1..20: mol_type = other DNA
attaacacactctcactttg

SEQ ID NO: 2054 - DNA, 20 bp, synthetic construct
  source 1..20: mol_type = other DNA
taagaccaagaaatttatgt

SEQ ID NO: 2055 - DNA, 20 bp, synthetic construct
  source 1..20: mol_type = other DNA
ccttttgccaaacacatggg

SEQ ID NO: 2056 - DNA, 20 bp, synthetic construct
  source 1..20: mol_type = other DNA
gtcctttaaagccacagttt

SEQ ID NO: 2057 - DNA, 20 bp, synthetic construct
  source 1..20: mol_type = other DNA
ttctctgagatctcttctct

SEQ ID NO: 2058 - DNA, 20 bp, synthetic construct
  source 1..20: mol_type = other DNA
acagttaaacacttatctaa

SEQ ID NO: 2059 - DNA, 20 bp, synthetic construct
  source 1..20: mol_type = other DNA
gctgtaaaatgaacctaagt

SEQ ID NO: 2060 - DNA, 20 bp, synthetic construct
  source 1..20: mol_type = other DNA
atgtttatagaatgtactga

SEQ ID NO: 2061 - DNA, 20 bp, synthetic construct
  source 1..20: mol_type = other DNA
cagaagccctttgttacata

SEQ ID NO: 2062 - DNA, 20 bp, synthetic construct
  source 1..20: mol_type = other DNA
aaagctgaatagatacatgt

SEQ ID NO: 2063 - DNA, 20 bp, synthetic construct
  source 1..20: mol_type = other DNA
acacttcacacccacaagga

SEQ ID NO: 2064 - DNA, 20 bp, synthetic construct
  source 1..20: mol_type = other DNA
tagggtttcgccatgttatc

SEQ ID NO: 2065 - DNA, 20 bp, synthetic construct
  source 1..20: mol_type = other DNA
acttttggtgttgctttttc

SEQ ID NO: 2066 - DNA, 20 bp, synthetic construct
  source 1..20: mol_type = other DNA
agtaataccccaaaagtaca

SEQ ID NO: 2067 - DNA, 20 bp, synthetic construct
  source 1..20: mol_type = other DNA
cagctatagaatacacattc

SEQ ID NO: 2068 - DNA, 20 bp, synthetic construct
  source 1..20: mol_type = other DNA
gatacctctacagagtcaca

SEQ ID NO: 2069 - DNA, 20 bp, synthetic construct
  source 1..20: mol_type = other DNA
ggcagatttatagttcagaa

SEQ ID NO: 2070 - DNA, 20 bp, synthetic construct
  source 1..20: mol_type = other DNA
ccccaatttatcaataagct

SEQ ID NO: 2071 - DNA, 20 bp, synthetic construct
  source 1..20: mol_type = other DNA
aaaaacaacaataaattcaa

SEQ ID NO: 2072 - DNA, 20 bp, synthetic construct
  source 1..20: mol_type = other DNA
aagttcccattgcattgttt

SEQ ID NO: 2073 - DNA, 20 bp, synthetic construct
  source 1..20: mol_type = other DNA
ggacagagaagaggaacagg

SEQ ID NO: 2074 - DNA, 20 bp, synthetic construct
  source 1..20: mol_type = other DNA
aaaacaccaacatggtgatt

SEQ ID NO: 2075 - DNA, 20 bp, synthetic construct
  source 1..20: mol_type = other DNA
agggtaaccaaacagctgga

SEQ ID NO: 2076 - DNA, 20 bp, synthetic construct
  source 1..20: mol_type = other DNA
agtataacacagcaccatgt

SEQ ID NO: 2077 - DNA, 20 bp, synthetic construct
  source 1..20: mol_type = other DNA
acagtgaaaaatctattatt

SEQ ID NO: 2078 - DNA, 20 bp, synthetic construct
  source 1..20: mol_type = other DNA
agcctgcctccatacagaca

SEQ ID NO: 2079 - DNA, 20 bp, synthetic construct
  source 1..20: mol_type = other DNA
tcataagagatgacaagcac

SEQ ID NO: 2080 - DNA, 20 bp, synthetic construct
  source 1..20: mol_type = other DNA
acctactatcttttacacac

SEQ ID NO: 2081 - DNA, 20 bp, synthetic construct
  source 1..20: mol_type = other DNA
attctgttcatggaggttca

SEQ ID NO: 2082 - DNA, 20 bp, synthetic construct
  source 1..20: mol_type = other DNA
gtgactatggacagcacacc

SEQ ID NO: 2083 - DNA, 20 bp, synthetic construct
  source 1..20: mol_type = other DNA
aagcgacaggaaagaattga

SEQ ID NO: 2084 - DNA, 20 bp, synthetic construct
  source 1..20: mol_type = other DNA
gagcccttgtttcctttttc

SEQ ID NO: 2085 - DNA, 20 bp, synthetic construct
  source 1..20: mol_type = other DNA
aactggcaacaccacacatc

SEQ ID NO: 2086 - DNA, 20 bp, synthetic construct
  source 1..20: mol_type = other DNA
tggctgcggcgaagcggcga

SEQ ID NO: 2087 - DNA, 20 bp, synthetic construct
  source 1..20: mol_type = other DNA
agaccaaggagccgccggga

SEQ ID NO: 2088 - DNA, 20 bp, synthetic construct
  source 1..20: mol_type = other DNA
tactctccattatttcttca

SEQ ID NO: 2089 - DNA, 20 bp, synthetic construct
  source 1..20: mol_type = other DNA
tgtatttttcttcctcactc

SEQ ID NO: 2090 - DNA, 20 bp, synthetic construct
  source 1..20: mol_type = other DNA
gatacaaattctaggccact

SEQ ID NO: 2091 - DNA, 20 bp, synthetic construct
  source 1..20: mol_type = other DNA
atccttagcacttggttcaa

SEQ ID NO: 2092 - DNA, 20 bp, synthetic construct
  source 1..20: mol_type = other DNA
cttgattcactggcatgggc

SEQ ID NO: 2093 - DNA, 20 bp, synthetic construct
  source 1..20: mol_type = other DNA
gggcagccttacaactgctg

SEQ ID NO: 2094 - DNA, 20 bp, synthetic construct
  source 1..20: mol_type = other DNA
caagtatcttccactgcaag

SEQ ID NO: 2095 - DNA, 20 bp, synthetic construct
  source 1..20: mol_type = other DNA
tgctagctgatgtgttcatg

SEQ ID NO: 2096 - DNA, 20 bp, synthetic construct
  source 1..20: mol_type = other DNA
acagtgatcacctcatcaaa

SEQ ID NO: 2097 - DNA, 20 bp, synthetic construct
  source 1..20: mol_type = other DNA
gccagagcctcactggcgca

SEQ ID NO: 2098 - DNA, 20 bp, synthetic construct
  source 1..20: mol_type = other DNA
accacccgcgcgccggagag

SEQ ID NO: 2099 - DNA, 20 bp, synthetic construct
  source 1..20: mol_type = other DNA
gaattatctgccaaatctct

SEQ ID NO: 2100 - DNA, 20 bp, synthetic construct
  source 1..20: mol_type = other DNA
ccaatccatttaaaattgta

SEQ ID NO: 2101 - DNA, 20 bp, synthetic construct
  source 1..20: mol_type = other DNA
tttaagatttaggatttttt

SEQ ID NO: 2102 - DNA, 20 bp, synthetic construct
  source 1..20: mol_type = other DNA
cacaaataattaccagcaaa

SEQ ID NO: 2103 - DNA, 20 bp, synthetic construct
  source 1..20: mol_type = other DNA
gaccaatatctgtactccca

SEQ ID NO: 2104 - DNA, 20 bp, synthetic construct
  source 1..20: mol_type = other DNA
aagttcctgctttcatagag

SEQ ID NO: 2105 - DNA, 20 bp, synthetic construct
  source 1..20: mol_type = other DNA
gcagccaatgatgagatact

SEQ ID NO: 2106 - DNA, 20 bp, synthetic construct
  source 1..20: mol_type = other DNA
cgggcccggcccgcatgttt

SEQ ID NO: 2107 - DNA, 20 bp, synthetic construct
  source 1..20: mol_type = other DNA
accagcctgacaggctgggc

SEQ ID NO: 2108 - DNA, 20 bp, synthetic construct
  source 1..20: mol_type = other DNA
ccaagcccatcaataccact

SEQ ID NO: 2109 - DNA, 20 bp, synthetic construct
  source 1..20: mol_type = other DNA
aatattccatacagatcgca

SEQ ID NO: 2110 - DNA, 20 bp, synthetic construct
  source 1..20: mol_type = other DNA
ctctattggtactgtcacca

SEQ ID NO: 2111 - DNA, 20 bp, synthetic construct
  source 1..20: mol_type = other DNA
gaaagataaagttgtttatt

SEQ ID NO: 2112 - DNA, 20 bp, synthetic construct
  source 1..20: mol_type = other DNA
tactggttcttgaccagaaa

SEQ ID NO: 2113 - DNA, 20 bp, synthetic construct
  source 1..20: mol_type = other DNA
cagcatcacctagtaattag

SEQ ID NO: 2114 - DNA, 20 bp, synthetic construct
  source 1..20: mol_type = other DNA
ttacttttaatcttttcatt

SEQ ID NO: 2115 - DNA, 20 bp, synthetic construct
  source 1..20: mol_type = other DNA
ttaaagtgaaatgttatatt

SEQ ID NO: 2116 - DNA, 20 bp, synthetic construct
  source 1..20: mol_type = other DNA
gcataaagaactctgcagac

SEQ ID NO: 2117 - DNA, 20 bp, synthetic construct
  source 1..20: mol_type = other DNA
aaccatgcctcttttttctc

SEQ ID NO: 2118 - DNA, 20 bp, synthetic construct
  source 1..20: mol_type = other DNA
tacaaactaattttttaaga

SEQ ID NO: 2119 - DNA, 20 bp, synthetic construct
  source 1..20: mol_type = other DNA
ttgattaaaccataccttcc

SEQ ID NO: 2120 - DNA, 20 bp, synthetic construct
  source 1..20: mol_type = other DNA
agccatcaaaacagccatag

SEQ ID NO: 2121 - DNA, 20 bp, synthetic construct
  source 1..20: mol_type = other DNA
cacagtttcactaggttctc

SEQ ID NO: 2122 - DNA, 20 bp, synthetic construct
  source 1..20: mol_type = other DNA
tctaataagctttagaatca

SEQ ID NO: 2123 - DNA, 20 bp, synthetic construct
  source 1..20: mol_type = other DNA
agaaaaaagaagaaaatgat

SEQ ID NO: 2124 - DNA, 20 bp, synthetic construct
  source 1..20: mol_type = other DNA
agaaaaaaaaaggctatata

SEQ ID NO: 2125 - DNA, 20 bp, synthetic construct
  source 1..20: mol_type = other DNA
ggaaagtggagtaagtaggg

SEQ ID NO: 2126 - DNA, 20 bp, synthetic construct
  source 1..20: mol_type = other DNA
gtgatgaacatacataataa

SEQ ID NO: 2127 - DNA, 20 bp, synthetic construct
  source 1..20: mol_type = other DNA
cctgcggcactttcaacaac

SEQ ID NO: 2128 - DNA, 20 bp, synthetic construct
  source 1..20: mol_type = other DNA
caccaaaagtagctctttct

SEQ ID NO: 2129 - DNA, 20 bp, synthetic construct
  source 1..20: mol_type = other DNA
tcccagaacccacttcttca

SEQ ID NO: 2130 - DNA, 20 bp, synthetic construct
  source 1..20: mol_type = other DNA
cagcatacccagctaagcac

SEQ ID NO: 2131 - DNA, 20 bp, synthetic construct
  source 1..20: mol_type = other DNA
actataatgtaagtctacca

SEQ ID NO: 2132 - DNA, 20 bp, synthetic construct
  source 1..20: mol_type = other DNA
aaagaaaagcaaaatgagtc

SEQ ID NO: 2133 - DNA, 20 bp, synthetic construct
  source 1..20: mol_type = other DNA
ctatcttcacaacatttttt

SEQ ID NO: 2134 - DNA, 20 bp, synthetic construct
  source 1..20: mol_type = other DNA
ctgtgagtatcaaatgataa

SEQ ID NO: 2135 - DNA, 20 bp, synthetic construct
  source 1..20: mol_type = other DNA
tcagctacatgggctgtcgc

SEQ ID NO: 2136 - DNA, 20 bp, synthetic construct
  source 1..20: mol_type = other DNA
cagatgctatagaaacacac

SEQ ID NO: 2137 - DNA, 20 bp, synthetic construct
  source 1..20: mol_type = other DNA
tcaatttcacagctgagatt

SEQ ID NO: 2138 - DNA, 20 bp, synthetic construct
  source 1..20: mol_type = other DNA
attaaagctgaatagataca

SEQ ID NO: 2139 - DNA, 20 bp, synthetic construct
  source 1..20: mol_type = other DNA
acaaaagatgttcaacatca

SEQ ID NO: 2140 - DNA, 20 bp, synthetic construct
  source 1..20: mol_type = other DNA
atattttttttttccactct

SEQ ID NO: 2141 - DNA, 20 bp, synthetic construct
  source 1..20: mol_type = other DNA
agtgaaggcaaaaatcagac

SEQ ID NO: 2142 - DNA, 20 bp, synthetic construct
  source 1..20: mol_type = other DNA
tggcatggtactggcataaa

SEQ ID NO: 2143 - DNA, 20 bp, synthetic construct
  source 1..20: mol_type = other DNA
ctcagtaacagtcggaaact

SEQ ID NO: 2144 - DNA, 20 bp, synthetic construct
  source 1..20: mol_type = other DNA
ggaattctcccagatcttcc

SEQ ID NO: 2145 - DNA, 20 bp, synthetic construct
  source 1..20: mol_type = other DNA
ataaaggaacttaaaagcta

SEQ ID NO: 2146 - DNA, 20 bp, synthetic construct
  source 1..20: mol_type = other DNA
taaaaaaaaattgcctcaaa

SEQ ID NO: 2147 - DNA, 20 bp, synthetic construct
  source 1..20: mol_type = other DNA
aaggctttggctacaaaaac

SEQ ID NO: 2148 - DNA, 20 bp, synthetic construct
  source 1..20: mol_type = other DNA
gacaacaaaaagttcccatt

SEQ ID NO: 2149 - DNA, 20 bp, synthetic construct
  source 1..20: mol_type = other DNA
acagttggacagagaagagg

SEQ ID NO: 2150 - DNA, 20 bp, synthetic construct
  source 1..20: mol_type = other DNA
ctaactgtatgcttaatagt

SEQ ID NO: 2151 - DNA, 20 bp, synthetic construct
  source 1..20: mol_type = other DNA
gactgccttaaaaagggaaa

SEQ ID NO: 2152 - DNA, 20 bp, synthetic construct
  source 1..20: mol_type = other DNA
ccaacactaactttctatct

SEQ ID NO: 2153 - DNA, 20 bp, synthetic construct
  source 1..20: mol_type = other DNA
atggacattttattttaaat

SEQ ID NO: 2154 - DNA, 20 bp, synthetic construct
  source 1..20: mol_type = other DNA
acagccttgctcctagcctg

SEQ ID NO: 2155 - DNA, 20 bp, synthetic construct
  source 1..20: mol_type = other DNA
ttttcataagagatgacaag

SEQ ID NO: 2156 - DNA, 20 bp, synthetic construct
  source 1..20: mol_type = other DNA
acatttgagacctcaaattg

SEQ ID NO: 2157 - DNA, 20 bp, synthetic construct
  source 1..20: mol_type = other DNA
cccagcctcttaaaaatgtc

SEQ ID NO: 2158 - DNA, 20 bp, synthetic construct
  source 1..20: mol_type = other DNA
gttgagaatcagaagcagag

SEQ ID NO: 2159 - DNA, 20 bp, synthetic construct
  source 1..20: mol_type = other DNA
ataaccttcacattctactt

SEQ ID NO: 2160 - DNA, 20 bp, synthetic construct
  source 1..20: mol_type = other DNA
tcaacctggtctcactcact

SEQ ID NO: 2161 - DNA, 20 bp, synthetic construct
  source 1..20: mol_type = other DNA
tgaaacagaaaactggcaac

SEQ ID NO: 2162 - DNA, 20 bp, synthetic construct
  source 1..20: mol_type = other DNA
ccgggccacctggctgcggc

SEQ ID NO: 2163 - DNA, 20 bp, synthetic construct
  source 1..20: mol_type = other DNA
cgccgagaccaaggagccgc

SEQ ID NO: 2164 - DNA, 20 bp, synthetic construct
  source 1..20: mol_type = other DNA
aatactctccattatttctt

SEQ ID NO: 2165 - DNA, 20 bp, synthetic construct
  source 1..20: mol_type = other DNA
gtgtatttttcttcctcact

SEQ ID NO: 2166 - DNA, 20 bp, synthetic construct
  source 1..20: mol_type = other DNA
gggatacaaattctaggcca

SEQ ID NO: 2167 - DNA, 20 bp, synthetic construct
  source 1..20: mol_type = other DNA
aatccttagcacttggttca

SEQ ID NO: 2168 - DNA, 20 bp, synthetic construct
  source 1..20: mol_type = other DNA
ggcttgattcactggcatgg

SEQ ID NO: 2169 - DNA, 20 bp, synthetic construct
  source 1..20: mol_type = other DNA
ctccagggcagccttacaac

SEQ ID NO: 2170 - DNA, 20 bp, synthetic construct
  source 1..20: mol_type = other DNA
cggtccaagtatcttccact

SEQ ID NO: 2171 - DNA, 20 bp, synthetic construct
  source 1..20: mol_type = other DNA
tcttttgctagctgatgtgt

SEQ ID NO: 2172 - DNA, 20 bp, synthetic construct
  source 1..20: mol_type = other DNA
accactgtagacagtgatca

SEQ ID NO: 2173 - DNA, 20 bp, synthetic construct
  source 1..20: mol_type = other DNA
accttgccagagcctcactg

SEQ ID NO: 2174 - DNA, 20 bp, synthetic construct
  source 1..20: mol_type = other DNA
tgcggatcggccaccacccg

SEQ ID NO: 2175 - DNA, 20 bp, synthetic construct
  source 1..20: mol_type = other DNA
tgcaacttaataaccttagt

SEQ ID NO: 2176 - DNA, 20 bp, synthetic construct
  source 1..20: mol_type = other DNA
gactaattaacctagataaa

SEQ ID NO: 2177 - DNA, 20 bp, synthetic construct
  source 1..20: mol_type = other DNA
gcttagagtttttgccttcc

SEQ ID NO: 2178 - DNA, 20 bp, synthetic construct
  source 1..20: mol_type = other DNA
ctttaaatgttaatgagaat

SEQ ID NO: 2179 - DNA, 20 bp, synthetic construct
  source 1..20: mol_type = other DNA
ctcccaggccgggagtggtg

SEQ ID NO: 2180 - DNA, 20 bp, synthetic construct
  source 1..20: mol_type = other DNA
taaataaactaagcctgaga

SEQ ID NO: 2181 - DNA, 20 bp, synthetic construct
  source 1..20: mol_type = other DNA
aagtacatcagattctaatg

SEQ ID NO: 2182 - DNA, 20 bp, synthetic construct
  source 1..20: mol_type = other DNA
aaacacttgttcctactgtc

SEQ ID NO: 2183 - DNA, 20 bp, synthetic construct
  source 1..20: mol_type = other DNA
cagatatggcactaccagcc

SEQ ID NO: 2184 - DNA, 20 bp, synthetic construct
  source 1..20: mol_type = other DNA
gtctgacagcatcaaatgtg

SEQ ID NO: 2185 - DNA, 20 bp, synthetic construct
  source 1..20: mol_type = other DNA
ggaaattaagtaatattcca

SEQ ID NO: 2186 - DNA, 20 bp, synthetic construct
  source 1..20: mol_type = other DNA
atctgaggtcaggaactcaa

SEQ ID NO: 2187 - DNA, 20 bp, synthetic construct
  source 1..20: mol_type = other DNA
caggaattaaaggccagtct

SEQ ID NO: 2188 - DNA, 20 bp, synthetic construct
  source 1..20: mol_type = other DNA
tgtagaatatacatatttac

SEQ ID NO: 2189 - DNA, 20 bp, synthetic construct
  source 1..20: mol_type = other DNA
tatgagggactagagcatcc

SEQ ID NO: 2190 - DNA, 20 bp, synthetic construct
  source 1..20: mol_type = other DNA
ctaatttccactgatctatg

SEQ ID NO: 2191 - DNA, 20 bp, synthetic construct
  source 1..20: mol_type = other DNA
acatcattaaagtgaaatgt

SEQ ID NO: 2192 - DNA, 20 bp, synthetic construct
  source 1..20: mol_type = other DNA
aaaagcataaagaactctgc

SEQ ID NO: 2193 - DNA, 20 bp, synthetic construct
  source 1..20: mol_type = other DNA
cgcaaccatgcctctttttt

SEQ ID NO: 2194 - DNA, 20 bp, synthetic construct
  source 1..20: mol_type = other DNA
cacatgcccacttataaact

SEQ ID NO: 2195 - DNA, 20 bp, synthetic construct
  source 1..20: mol_type = other DNA
acaccctgactgtccagagc

SEQ ID NO: 2196 - DNA, 20 bp, synthetic construct
  source 1..20: mol_type = other DNA
ctctatggctacagccatca

SEQ ID NO: 2197 - DNA, 20 bp, synthetic construct
  source 1..20: mol_type = other DNA
tcactaggtacacagtttca

SEQ ID NO: 2198 - DNA, 20 bp, synthetic construct
  source 1..20: mol_type = other DNA
tgtggaaaaaaatttccaaa

SEQ ID NO: 2199 - DNA, 20 bp, synthetic construct
  source 1..20: mol_type = other DNA
gctcaggagttcaagacagc

SEQ ID NO: 2200 - DNA, 20 bp, synthetic construct
  source 1..20: mol_type = other DNA
ctgcaatcatgccactgcgc

SEQ ID NO: 2201 - DNA, 20 bp, synthetic construct
  source 1..20: mol_type = other DNA
actggttctccaactgtact

SEQ ID NO: 2202 - DNA, 20 bp, synthetic construct
  source 1..20: mol_type = other DNA
gcattaaatattaagatcca

SEQ ID NO: 2203 - DNA, 20 bp, synthetic construct
  source 1..20: mol_type = other DNA
tcaaagttccatataaacct

SEQ ID NO: 2204 - DNA, 20 bp, synthetic construct
  source 1..20: mol_type = other DNA
ttcaccaaaagtagctcttt

SEQ ID NO: 2205 - DNA, 20 bp, synthetic construct
  source 1..20: mol_type = other DNA
gccattctaagtggtttaac

SEQ ID NO: 2206 - DNA, 20 bp, synthetic construct
  source 1..20: mol_type = other DNA
taacactcatttttggcaag

SEQ ID NO: 2207 - DNA, 20 bp, synthetic construct
  source 1..20: mol_type = other DNA
taaccttgggtcctcctgtg

SEQ ID NO: 2208 - DNA, 20 bp, synthetic construct
  source 1..20: mol_type = other DNA
tctctttctaagggcactct

SEQ ID NO: 2209 - DNA, 20 bp, synthetic construct
  source 1..20: mol_type = other DNA
ccacttgacctctctatggc

SEQ ID NO: 2210 - DNA, 20 bp, synthetic construct
  source 1..20: mol_type = other DNA
gtttggaatcttattaagca

SEQ ID NO: 2211 - DNA, 20 bp, synthetic construct
  source 1..20: mol_type = other DNA
ttcttctggcattctaaaaa

SEQ ID NO: 2212 - DNA, 20 bp, synthetic construct
  source 1..20: mol_type = other DNA
atattccttatgctaatcac

SEQ ID NO: 2213 - DNA, 20 bp, synthetic construct
  source 1..20: mol_type = other DNA
tataatatcaccctctaaca

SEQ ID NO: 2214 - DNA, 20 bp, synthetic construct
  source 1..20: mol_type = other DNA
aactgttaatagcattaaag

SEQ ID NO: 2215 - DNA, 20 bp, synthetic construct
  source 1..20: mol_type = other DNA
catcaatccaaagaagatat

SEQ ID NO: 2216 - DNA, 20 bp, synthetic construct
  source 1..20: mol_type = other DNA
catattttttttttccactc

SEQ ID NO: 2217 - DNA, 20 bp, synthetic construct
  source 1..20: mol_type = other DNA
ctttagtagaggcgatccac

SEQ ID NO: 2218 - DNA, 20 bp, synthetic construct
  source 1..20: mol_type = other DNA
atcattatctgacttcaaat

SEQ ID NO: 2219 - DNA, 20 bp, synthetic construct
  source 1..20: mol_type = other DNA
gacctcagtaacagtcggaa

SEQ ID NO: 2220 - DNA, 20 bp, synthetic construct
  source 1..20: mol_type = other DNA
catttgtttggagaaatgta

SEQ ID NO: 2221 - DNA, 20 bp, synthetic construct
  source 1..20: mol_type = other DNA
aaaggaatatgacaataaag

SEQ ID NO: 2222 - DNA, 20 bp, synthetic construct
  source 1..20: mol_type = other DNA
gacatacctggaaaaagtca

SEQ ID NO: 2223 - DNA, 20 bp, synthetic construct
  source 1..20: mol_type = other DNA
cttggtgtcagatacaaaca

SEQ ID NO: 2224 - DNA, 20 bp, synthetic construct
  source 1..20: mol_type = other DNA
agccaaactgtcatgcttgc

SEQ ID NO: 2225 - DNA, 20 bp, synthetic construct
  source 1..20: mol_type = other DNA
tagtaaaagaaggcagatta

SEQ ID NO: 2226 - DNA, 20 bp, synthetic construct
  source 1..20: mol_type = other DNA
aacaaacccacctctgcaaa

SEQ ID NO: 2227 - DNA, 20 bp, synthetic construct
  source 1..20: mol_type = other DNA
tttggaggataacagaaaac

SEQ ID NO: 2228 - DNA, 20 bp, synthetic construct
  source 1..20: mol_type = other DNA
aacagatccaacactaactt

SEQ ID NO: 2229 - DNA, 20 bp, synthetic construct
  source 1..20: mol_type = other DNA
aatgaaatcagtactattta

SEQ ID NO: 2230 - DNA, 20 bp, synthetic construct
  source 1..20: mol_type = other DNA
cctccccaagttcttggatt

SEQ ID NO: 2231 - DNA, 20 bp, synthetic construct
  source 1..20: mol_type = other DNA
ttcattttcataagagatga

SEQ ID NO: 2232 - DNA, 20 bp, synthetic construct
  source 1..20: mol_type = other DNA
gggaagttgtgctaaggcaa

SEQ ID NO: 2233 - DNA, 20 bp, synthetic construct
  source 1..20: mol_type = other DNA
gactacaggcgcgcctggct

SEQ ID NO: 2234 - DNA, 20 bp, synthetic construct
  source 1..20: mol_type = other DNA
gaactgaaagccagttcttt

SEQ ID NO: 2235 - DNA, 20 bp, synthetic construct
  source 1..20: mol_type = other DNA
aaaggactgaccaatcagca

SEQ ID NO: 2236 - DNA, 20 bp, synthetic construct
  source 1..20: mol_type = other DNA
ttgcctctctccctctgctt

SEQ ID NO: 2237 - DNA, 20 bp, synthetic construct
  source 1..20: mol_type = other DNA
gaaaagcgaacattgaaaca

SEQ ID NO: 2238 - DNA, 20 bp, synthetic construct
  source 1..20: mol_type = other DNA
gccacccgggccacctggct

SEQ ID NO: 2239 - DNA, 20 bp, synthetic construct
  source 1..20: mol_type = other DNA
aggcccgccgagaccaagga

SEQ ID NO: 2240 - DNA, 20 bp, synthetic construct
  source 1..20: mol_type = other DNA
acaaaatactctccattatt

SEQ ID NO: 2241 - DNA, 20 bp, synthetic construct
  source 1..20: mol_type = other DNA
tgtgtatttttcttcctcac

SEQ ID NO: 2242 - DNA, 20 bp, synthetic construct
  source 1..20: mol_type = other DNA
ggttgtgggatacaaattct

SEQ ID NO: 2243 - DNA, 20 bp, synthetic construct
  source 1..20: mol_type = other DNA
gaatccttagcacttggttc

SEQ ID NO: 2244 - DNA, 20 bp, synthetic construct
  source 1..20: mol_type = other DNA
tggcttgattcactggcatg

SEQ ID NO: 2245 - DNA, 20 bp, synthetic construct
  source 1..20: mol_type = other DNA
ggcctttcggttcctccagg

SEQ ID NO: 2246 - DNA, 20 bp, synthetic construct
  source 1..20: mol_type = other DNA
ctactcggtccaagtatctt

SEQ ID NO: 2247 - DNA, 20 bp, synthetic construct
  source 1..20: mol_type = other DNA
ttacttcttttgctagctga

SEQ ID NO: 2248 - DNA, 20 bp, synthetic construct
  source 1..20: mol_type = other DNA
cttaaaagttgaaccactgt

SEQ ID NO: 2249 - DNA, 20 bp, synthetic construct
  source 1..20: mol_type = other DNA
cccacaccttgccagagcct

SEQ ID NO: 2250 - DNA, 20 bp, synthetic construct
  source 1..20: mol_type = other DNA
agcaatgcggatcggccacc

SEQ ID NO: 2251 - DNA, 20 bp, synthetic construct
  source 1..20: mol_type = other DNA
aaagaccttgtggtactaaa

SEQ ID NO: 2252 - DNA, 20 bp, synthetic construct
  source 1..20: mol_type = other DNA
ataaattactaatgaagcca

SEQ ID NO: 2253 - DNA, 20 bp, synthetic construct
  source 1..20: mol_type = other DNA
caaagcttagagtttttgcc

SEQ ID NO: 2254 - DNA, 20 bp, synthetic construct
  source 1..20: mol_type = other DNA
tatttgcaacactgcactcc

SEQ ID NO: 2255 - DNA, 20 bp, synthetic construct
  source 1..20: mol_type = other DNA
acctggtgttatgagtcacc

SEQ ID NO: 2256 - DNA, 20 bp, synthetic construct
  source 1..20: mol_type = other DNA
agtatctcagtttttttttt

SEQ ID NO: 2257 - DNA, 20 bp, synthetic construct
  source 1..20: mol_type = other DNA
gaaataaaagtacatcagat

SEQ ID NO: 2258 - DNA, 20 bp, synthetic construct
  source 1..20: mol_type = other DNA
ccatcccagataacacggcg

SEQ ID NO: 2259 - DNA, 20 bp, synthetic construct
  source 1..20: mol_type = other DNA
aaagactttgaaatctcaca

SEQ ID NO: 2260 - DNA, 20 bp, synthetic construct
  source 1..20: mol_type = other DNA
tgcatgcctgccttctctac

SEQ ID NO: 2261 - DNA, 20 bp, synthetic construct
  source 1..20: mol_type = other DNA
ttcataaggttgtggaaatt

SEQ ID NO: 2262 - DNA, 20 bp, synthetic construct
  source 1..20: mol_type = other DNA
cgtatgtttgtctgtcttat

SEQ ID NO: 2263 - DNA, 20 bp, synthetic construct
  source 1..20: mol_type = other DNA
ggtgcagcctgtagtctcag

SEQ ID NO: 2264 - DNA, 20 bp, synthetic construct
  source 1..20: mol_type = other DNA
tccacatatatatgtagaat

SEQ ID NO: 2265 - DNA, 20 bp, synthetic construct
  source 1..20: mol_type = other DNA
aatcactcgagattaaaaac

SEQ ID NO: 2266 - DNA, 20 bp, synthetic construct
  source 1..20: mol_type = other DNA
tataaaaaaacagtacagta

SEQ ID NO: 2267 - DNA, 20 bp, synthetic construct
  source 1..20: mol_type = other DNA
atagaatataatacaaccta

SEQ ID NO: 2268 - DNA, 20 bp, synthetic construct
  source 1..20: mol_type = other DNA
caaaataaaaagcataaaga

SEQ ID NO: 2269 - DNA, 20 bp, synthetic construct
  source 1..20: mol_type = other DNA
tgtcatactgtattgtttta

SEQ ID NO: 2270 - DNA, 20 bp, synthetic construct
  source 1..20: mol_type = other DNA
ctcaaaaccttgtctcatac

SEQ ID NO: 2271 - DNA, 20 bp, synthetic construct
  source 1..20: mol_type = other DNA
gaaacccatagctcacaccc

SEQ ID NO: 2272 - DNA, 20 bp, synthetic construct
  source 1..20: mol_type = other DNA
cagctacaactactcaactc

SEQ ID NO: 2273 - DNA, 20 bp, synthetic construct
  source 1..20: mol_type = other DNA
aaaattaatttttaaaagaa

SEQ ID NO: 2274 - DNA, 20 bp, synthetic construct
  source 1..20: mol_type = other DNA
acaagttatgttttaattct

SEQ ID NO: 2275 - DNA, 20 bp, synthetic construct
  source 1..20: mol_type = other DNA
attaggcttctggatcagga

SEQ ID NO: 2276 - DNA, 20 bp, synthetic construct
  source 1..20: mol_type = other DNA
agatgcggtggctcatggct

SEQ ID NO: 2277 - DNA, 20 bp, synthetic construct
  source 1..20: mol_type = other DNA
ggtaaaaaagacactacata

SEQ ID NO: 2278 - DNA, 20 bp, synthetic construct
  source 1..20: mol_type = other DNA
tgttggcatagtaacataca

SEQ ID NO: 2279 - DNA, 20 bp, synthetic construct
  source 1..20: mol_type = other DNA
aaatcagccttttctcaaac

SEQ ID NO: 2280 - DNA, 20 bp, synthetic construct
  source 1..20: mol_type = other DNA
tggttttaaaatttcaccaa

SEQ ID NO: 2281 - DNA, 20 bp, synthetic construct
  source 1..20: mol_type = other DNA
gaagccattctaagtggttt

SEQ ID NO: 2282 - DNA, 20 bp, synthetic construct
  source 1..20: mol_type = other DNA
atatgttacaaattctcttt

SEQ ID NO: 2283 - DNA, 20 bp, synthetic construct
  source 1..20: mol_type = other DNA
taaaggttgtaatccatccc

SEQ ID NO: 2284 - DNA, 20 bp, synthetic construct
  source 1..20: mol_type = other DNA
atataataacaatacaccgt

SEQ ID NO: 2285 - DNA, 20 bp, synthetic construct
  source 1..20: mol_type = other DNA
cacaaagtttaacagatgcg

SEQ ID NO: 2286 - DNA, 20 bp, synthetic construct
  source 1..20: mol_type = other DNA
tggttccttacaattatcta

SEQ ID NO: 2287 - DNA, 20 bp, synthetic construct
  source 1..20: mol_type = other DNA
taagattgcaaagctaactt

SEQ ID NO: 2288 - DNA, 20 bp, synthetic construct
  source 1..20: mol_type = other DNA
ctgtcagcatattccttatg

SEQ ID NO: 2289 - DNA, 20 bp, synthetic construct
  source 1..20: mol_type = other DNA
cctttgtaacacagacacta

SEQ ID NO: 2290 - DNA, 20 bp, synthetic construct
  source 1..20: mol_type = other DNA
tctatttttggtcaagacag

SEQ ID NO: 2291 - DNA, 20 bp, synthetic construct
  source 1..20: mol_type = other DNA
aagacaactcaatttttaaa

SEQ ID NO: 2292 - DNA, 20 bp, synthetic construct
  source 1..20: mol_type = other DNA
ttagaaagttcactctttta

SEQ ID NO: 2293 - DNA, 20 bp, synthetic construct
  source 1..20: mol_type = other DNA
acaaaaatctttagtagagg

SEQ ID NO: 2294 - DNA, 20 bp, synthetic construct
  source 1..20: mol_type = other DNA
aaaacgggaggaatcattat

SEQ ID NO: 2295 - DNA, 20 bp, synthetic construct
  source 1..20: mol_type = other DNA
atagattttgagacaaagtc

SEQ ID NO: 2296 - DNA, 20 bp, synthetic construct
  source 1..20: mol_type = other DNA
ggccatggcagtgcttgtgt

SEQ ID NO: 2297 - DNA, 20 bp, synthetic construct
  source 1..20: mol_type = other DNA
aagcaccaatggctggacca

SEQ ID NO: 2298 - DNA, 20 bp, synthetic construct
  source 1..20: mol_type = other DNA
tattctagcatgcagtaatt

SEQ ID NO: 2299 - DNA, 20 bp, synthetic construct
  source 1..20: mol_type = other DNA
cctaaagagtgcttggtgtc

SEQ ID NO: 2300 - DNA, 20 bp, synthetic construct
  source 1..20: mol_type = other DNA
ttagaatgtgactctcccat

SEQ ID NO: 2301 - DNA, 20 bp, synthetic construct
  source 1..20: mol_type = other DNA
atctaaagaggataaatcta

SEQ ID NO: 2302 - DNA, 20 bp, synthetic construct
  source 1..20: mol_type = other DNA
aagtatttgaacataatcca

SEQ ID NO: 2303 - DNA, 20 bp, synthetic construct
  source 1..20: mol_type = other DNA
aaaaaaaattccagaagttt

SEQ ID NO: 2304 - DNA, 20 bp, synthetic construct
  source 1..20: mol_type = other DNA
gcattatgaaatcgcttctc

SEQ ID NO: 2305 - DNA, 20 bp, synthetic construct
  source 1..20: mol_type = other DNA
ccataatctcattctcatag

SEQ ID NO: 2306 - DNA, 20 bp, synthetic construct
  source 1..20: mol_type = other DNA
agaacatgcttaagcagatt

SEQ ID NO: 2307 - DNA, 20 bp, synthetic construct
  source 1..20: mol_type = other DNA
ggcacaaggaaaatattgtt

SEQ ID NO: 2308 - DNA, 20 bp, synthetic construct
  source 1..20: mol_type = other DNA
gaccaaaccatcataaaatg

SEQ ID NO: 2309 - DNA, 20 bp, synthetic construct
  source 1..20: mol_type = other DNA
aaaaatttatttttgaataa

SEQ ID NO: 2310 - DNA, 20 bp, synthetic construct
  source 1..20: mol_type = other DNA
gagtgccccagccctttgga

SEQ ID NO: 2311 - DNA, 20 bp, synthetic construct
  source 1..20: mol_type = other DNA
gatatttttaaggtctcagt

SEQ ID NO: 2312 - DNA, 20 bp, synthetic construct
  source 1..20: mol_type = other DNA
ttacttggacctctgttcat

SEQ ID NO: 2313 - DNA, 20 bp, synthetic construct
  source 1..20: mol_type = other DNA
ttgtactgtaaaaagaaaag

SEQ ID NO: 2314 - DNA, 20 bp, synthetic construct
  source 1..20: mol_type = other DNA
tttgttactgtttcgacctc

SEQ ID NO: 2315 - DNA, 20 bp, synthetic construct
  source 1..20: mol_type = other DNA
gctctgttcgatgcaggact

SEQ ID NO: 2316 - DNA, 20 bp, synthetic construct
  source 1..20: mol_type = other DNA
gttcatgactttcaagggtt

SEQ ID NO: 2317 - DNA, 20 bp, synthetic construct
  source 1..20: mol_type = other DNA
cttcttttgctagctgatgt

SEQ ID NO: 2318 - DNA, 20 bp, synthetic construct
  source 1..20: mol_type = other DNA
ttccttctccctttgaacac

SEQ ID NO: 2319 - DNA, 20 bp, synthetic construct
  source 1..20: mol_type = other DNA
tggctaagtagtgtttggga

SEQ ID NO: 2320 - DNA, 20 bp, synthetic construct
  source 1..20: mol_type = other DNA
aatctaatttttaagcctag

SEQ ID NO: 2321 - DNA, 20 bp, synthetic construct
  source 1..20: mol_type = other DNA
ctttcagatgaaaaagaaag

SEQ ID NO: 2322 - DNA, 20 bp, synthetic construct
  source 1..20: mol_type = other DNA
ggtaacagtaacatcataga

SEQ ID NO: 2323 - DNA, 20 bp, synthetic construct
  source 1..20: mol_type = other DNA
atgatcttgtgtatatatta

SEQ ID NO: 2324 - DNA, 20 bp, synthetic construct
  source 1..20: mol_type = other DNA
cgtaagtacagaaccacata

SEQ ID NO: 2325 - DNA, 20 bp, synthetic construct
  source 1..20: mol_type = other DNA
ctaatgtgtttcacaatcta

SEQ ID NO: 2326 - DNA, 20 bp, synthetic construct
  source 1..20: mol_type = other DNA
ttctggacaccaaggtgggt

SEQ ID NO: 2327 - DNA, 20 bp, synthetic construct
  source 1..20: mol_type = other DNA
cattacgaccattctgctca

SEQ ID NO: 2328 - DNA, 20 bp, synthetic construct
  source 1..20: mol_type = other DNA
gaattcgaggttacacagtt

SEQ ID NO: 2329 - DNA, 20 bp, synthetic construct
  source 1..20: mol_type = other DNA
ttgtctacagtagcatacag

SEQ ID NO: 2330 - DNA, 20 bp, synthetic construct
  source 1..20: mol_type = other DNA
ctctgtcgcctgggatggta

SEQ ID NO: 2331 - DNA, 20 bp, synthetic construct
  source 1..20: mol_type = other DNA
aagcaaagactttgaaatct

SEQ ID NO: 2332 - DNA, 20 bp, synthetic construct
  source 1..20: mol_type = other DNA
agtgagttccatactctaat

SEQ ID NO: 2333 - DNA, 20 bp, synthetic construct
  source 1..20: mol_type = other DNA
cagtaattaagaataaaatg

SEQ ID NO: 2334 - DNA, 20 bp, synthetic construct
  source 1..20: mol_type = other DNA
atattccatacagatcgcat

SEQ ID NO: 2335 - DNA, 20 bp, synthetic construct
  source 1..20: mol_type = other DNA
cttcttgttgttgtttacat

SEQ ID NO: 2336 - DNA, 20 bp, synthetic construct
  source 1..20: mol_type = other DNA
ttccaatttcagacttcttg

SEQ ID NO: 2337 - DNA, 20 bp, synthetic construct
  source 1..20: mol_type = other DNA
tgtttgtctgtcttattcac

SEQ ID NO: 2338 - DNA, 20 bp, synthetic construct
  source 1..20: mol_type = other DNA
gtgctctctttgcgcctgtg

SEQ ID NO: 2339 - DNA, 20 bp, synthetic construct
  source 1..20: mol_type = other DNA
tgaatcagtatttactactt

SEQ ID NO: 2340 - DNA, 20 bp, synthetic construct
  source 1..20: mol_type = other DNA
aatgggataaatatatacaa

SEQ ID NO: 2341 - DNA, 20 bp, synthetic construct
  source 1..20: mol_type = other DNA
aagagttaatgatgctttca

SEQ ID NO: 2342 - DNA, 20 bp, synthetic construct
  source 1..20: mol_type = other DNA
aagtaaaatagcctactgga

SEQ ID NO: 2343 - DNA, 20 bp, synthetic construct
  source 1..20: mol_type = other DNA
aatacttaagtcacttacat

SEQ ID NO: 2344 - DNA, 20 bp, synthetic construct
  source 1..20: mol_type = other DNA
aaaaatcctcatatctaaat

SEQ ID NO: 2345 - DNA, 20 bp, synthetic construct
  source 1..20: mol_type = other DNA
tgttaggaattctttagctc

SEQ ID NO: 2346 - DNA, 20 bp, synthetic construct
  source 1..20: mol_type = other DNA
tccaagtaacagtgtagaag

SEQ ID NO: 2347 - DNA, 20 bp, synthetic construct
  source 1..20: mol_type = other DNA
cagttgccaattctgagaca

SEQ ID NO: 2348 - DNA, 20 bp, synthetic construct
  source 1..20: mol_type = other DNA
agtaattcttcagactaaat

SEQ ID NO: 2349 - DNA, 20 bp, synthetic construct
  source 1..20: mol_type = other DNA
agtttcactaggttctcaaa

SEQ ID NO: 2350 - DNA, 20 bp, synthetic construct
  source 1..20: mol_type = other DNA
tctttcttttaatctcaata

SEQ ID NO: 2351 - DNA, 20 bp, synthetic construct
  source 1..20: mol_type = other DNA
ttttgtttaatcacagtttt

SEQ ID NO: 2352 - DNA, 20 bp, synthetic construct
  source 1..20: mol_type = other DNA
aacaaacagagaggaactgc

SEQ ID NO: 2353 - DNA, 20 bp, synthetic construct
  source 1..20: mol_type = other DNA
agaatccacagatccaggtg

SEQ ID NO: 2354 - DNA, 20 bp, synthetic construct
  source 1..20: mol_type = other DNA
atgggccccttcaatatttt

SEQ ID NO: 2355 - DNA, 20 bp, synthetic construct
  source 1..20: mol_type = other DNA
gaaaacacagaagtgtgatt

SEQ ID NO: 2356 - DNA, 20 bp, synthetic construct
  source 1..20: mol_type = other DNA
cagtactgtaagttgccact

SEQ ID NO: 2357 - DNA, 20 bp, synthetic construct
  source 1..20: mol_type = other DNA
atttcctttaaatacctagt

SEQ ID NO: 2358 - DNA, 20 bp, synthetic construct
  source 1..20: mol_type = other DNA
actatcaactgccactgctg

SEQ ID NO: 2359 - DNA, 20 bp, synthetic construct
  source 1..20: mol_type = other DNA
tggctccaatatcggcaatg

SEQ ID NO: 2360 - DNA, 20 bp, synthetic construct
  source 1..20: mol_type = other DNA
atggctgattccatcaatct

SEQ ID NO: 2361 - DNA, 20 bp, synthetic construct
  source 1..20: mol_type = other DNA
acataggttagaattttcca

SEQ ID NO: 2362 - DNA, 20 bp, synthetic construct
  source 1..20: mol_type = other DNA
gtttcttttacttaagttgc

SEQ ID NO: 2363 - DNA, 20 bp, synthetic construct
  source 1..20: mol_type = other DNA
catatatttctcagccccct

SEQ ID NO: 2364 - DNA, 20 bp, synthetic construct
  source 1..20: mol_type = other DNA
tagagtttgtgactcctgtg

SEQ ID NO: 2365 - DNA, 20 bp, synthetic construct
  source 1..20: mol_type = other DNA
tgaacccagaactcagtttg

SEQ ID NO: 2366 - DNA, 20 bp, synthetic construct
  source 1..20: mol_type = other DNA
taaatcacaataattcctac

SEQ ID NO: 2367 - DNA, 20 bp, synthetic construct
  source 1..20: mol_type = other DNA
ttgatttgtgataagtttta

SEQ ID NO: 2368 - DNA, 20 bp, synthetic construct
  source 1..20: mol_type = other DNA
caaaaatgatttcttgtaca

SEQ ID NO: 2369 - DNA, 20 bp, synthetic construct
  source 1..20: mol_type = other DNA
ttaacggttgcttagggttg

SEQ ID NO: 2370 - DNA, 20 bp, synthetic construct
  source 1..20: mol_type = other DNA
agactttttatgttgctcct

SEQ ID NO: 2371 - DNA, 20 bp, synthetic construct
  source 1..20: mol_type = other DNA
agcaattcttacacaaataa

SEQ ID NO: 2372 - DNA, 20 bp, synthetic construct
  source 1..20: mol_type = other DNA
tcagtataggcaaaccaatt

SEQ ID NO: 2373 - DNA, 20 bp, synthetic construct
  source 1..20: mol_type = other DNA
aagttaaaaagcgggcagat

SEQ ID NO: 2374 - DNA, 20 bp, synthetic construct
  source 1..20: mol_type = other DNA
ctgggcctagtcagcttgga

SEQ ID NO: 2375 - DNA, 20 bp, synthetic construct
  source 1..20: mol_type = other DNA
acccaaaaaaacacattgag

SEQ ID NO: 2376 - DNA, 20 bp, synthetic construct
  source 1..20: mol_type = other DNA
caaaaagttcccattgcatt

SEQ ID NO: 2377 - DNA, 20 bp, synthetic construct
  source 1..20: mol_type = other DNA
caatattctgagaaaggact

SEQ ID NO: 2378 - DNA, 20 bp, synthetic construct
  source 1..20: mol_type = other DNA
taattatagagttcatatgg

SEQ ID NO: 2379 - DNA, 20 bp, synthetic construct
  source 1..20: mol_type = other DNA
ttacttattaccttcctgta

SEQ ID NO: 2380 - DNA, 20 bp, synthetic construct
  source 1..20: mol_type = other DNA
aaaaaagcagactgcctatt

SEQ ID NO: 2381 - DNA, 20 bp, synthetic construct
  source 1..20: mol_type = other DNA
tttttgcttattattctcac

SEQ ID NO: 2382 - DNA, 20 bp, synthetic construct
  source 1..20: mol_type = other DNA
catgtagttacatgtaacca

SEQ ID NO: 2383 - DNA, 20 bp, synthetic construct
  source 1..20: mol_type = other DNA
ggctgtttcaaaaccaatga

SEQ ID NO: 2384 - DNA, 20 bp, synthetic construct
  source 1..20: mol_type = other DNA
ggtcaaggtcaatacttttt

SEQ ID NO: 2385 - DNA, 20 bp, synthetic construct
  source 1..20: mol_type = other DNA
gctgtccaagataatgacct

SEQ ID NO: 2386 - DNA, 20 bp, synthetic construct
  source 1..20: mol_type = other DNA
ttaatttgtaactaggtttt

SEQ ID NO: 2387 - DNA, 20 bp, synthetic construct
  source 1..20: mol_type = other DNA
cccctactgttaaaccatta

SEQ ID NO: 2388 - DNA, 20 bp, synthetic construct
  source 1..20: mol_type = other DNA
atgtctgacaacctccatcg

SEQ ID NO: 2389 - DNA, 20 bp, synthetic construct
  source 1..20: mol_type = other DNA
cagaacctaaactttgcagg

SEQ ID NO: 2390 - DNA, 20 bp, synthetic construct
  source 1..20: mol_type = other DNA
ctttgttactgtttcgacct

SEQ ID NO: 2391 - DNA, 20 bp, synthetic construct
  source 1..20: mol_type = other DNA
gtttcattgggtttaatatt

SEQ ID NO: 2392 - DNA, 20 bp, synthetic construct
  source 1..20: mol_type = other DNA
tgttcatgactttcaagggt

SEQ ID NO: 2393 - DNA, 20 bp, synthetic construct
  source 1..20: mol_type = other DNA
acttcttttgctagctgatg

SEQ ID NO: 2394 - DNA, 20 bp, synthetic construct
  source 1..20: mol_type = other DNA
gggaggccgcccgctccctc

SEQ ID NO: 2395 - DNA, 20 bp, synthetic construct
  source 1..20: mol_type = other DNA
tttccttctccctttgaaca

SEQ ID NO: 2396 - DNA, 20 bp, synthetic construct
  source 1..20: mol_type = other DNA
acatccttttctataaaagt

SEQ ID NO: 2397 - DNA, 20 bp, synthetic construct
  source 1..20: mol_type = other DNA
gaaaaatctaaattaacctt

SEQ ID NO: 2398 - DNA, 20 bp, synthetic construct
  source 1..20: mol_type = other DNA
ggaatgtagaagaagaagag

SEQ ID NO: 2399 - DNA, 20 bp, synthetic construct
  source 1..20: mol_type = other DNA
gagtttttgccttccatttt

SEQ ID NO: 2400 - DNA, 20 bp, synthetic construct
  source 1..20: mol_type = other DNA
catgatcttgtgtatatatt

SEQ ID NO: 2401 - DNA, 20 bp, synthetic construct
  source 1..20: mol_type = other DNA
acagctgtgacaagttttca

SEQ ID NO: 2402 - DNA, 20 bp, synthetic construct
  source 1..20: mol_type = other DNA
aaaaatgcttgtcataatcc

SEQ ID NO: 2403 - DNA, 20 bp, synthetic construct
  source 1..20: mol_type = other DNA
aagtgccaaccattcaagaa

SEQ ID NO: 2404 - DNA, 20 bp, synthetic construct
  source 1..20: mol_type = other DNA
tcattacgaccattctgctc

SEQ ID NO: 2405 - DNA, 20 bp, synthetic construct
  source 1..20: mol_type = other DNA
tgaccaatgctcctctctgc

SEQ ID NO: 2406 - DNA, 20 bp, synthetic construct
  source 1..20: mol_type = other DNA
aaccagtaagttaaggtaaa

SEQ ID NO: 2407 - DNA, 20 bp, synthetic construct
  source 1..20: mol_type = other DNA
ccagaaaaaatggccactac

SEQ ID NO: 2408 - DNA, 20 bp, synthetic construct
  source 1..20: mol_type = other DNA
aaagcaaagactttgaaatc

SEQ ID NO: 2409 - DNA, 20 bp, synthetic construct
  source 1..20: mol_type = other DNA
tgttcagtgtccttctagcc

SEQ ID NO: 2410 - DNA, 20 bp, synthetic construct
  source 1..20: mol_type = other DNA
cagtgaggaaggagaccatc

SEQ ID NO: 2411 - DNA, 20 bp, synthetic construct
  source 1..20: mol_type = other DNA
taatattccatacagatcgc

SEQ ID NO: 2412 - DNA, 20 bp, synthetic construct
  source 1..20: mol_type = other DNA
acttcttgttgttgtttaca

SEQ ID NO: 2413 - DNA, 20 bp, synthetic construct
  source 1..20: mol_type = other DNA
cttccaatttcagacttctt

SEQ ID NO: 2414 - DNA, 20 bp, synthetic construct
  source 1..20: mol_type = other DNA
atgtttgtctgtcttattca

SEQ ID NO: 2415 - DNA, 20 bp, synthetic construct
  source 1..20: mol_type = other DNA
tgtgctctctttgcgcctgt

SEQ ID NO: 2416 - DNA, 20 bp, synthetic construct
  source 1..20: mol_type = other DNA
atgaatcagtatttactact

SEQ ID NO: 2417 - DNA, 20 bp, synthetic construct
  source 1..20: mol_type = other DNA
gcatcactacttggtaacac

SEQ ID NO: 2418 - DNA, 20 bp, synthetic construct
  source 1..20: mol_type = other DNA
tttaccattctgtctacttt

SEQ ID NO: 2419 - DNA, 20 bp, synthetic construct
  source 1..20: mol_type = other DNA
agagctcacctaatattaag

SEQ ID NO: 2420 - DNA, 20 bp, synthetic construct
  source 1..20: mol_type = other DNA
cttcagataccgaattacat

SEQ ID NO: 2421 - DNA, 20 bp, synthetic construct
  source 1..20: mol_type = other DNA
tattatccattccatcattt

SEQ ID NO: 2422 - DNA, 20 bp, synthetic construct
  source 1..20: mol_type = other DNA
taaaatttgttaggaattct

SEQ ID NO: 2423 - DNA, 20 bp, synthetic construct
  source 1..20: mol_type = other DNA
agaacactgtgctttcatca

SEQ ID NO: 2424 - DNA, 20 bp, synthetic construct
  source 1..20: mol_type = other DNA
caaatgataacagcagagac

SEQ ID NO: 2425 - DNA, 20 bp, synthetic construct
  source 1..20: mol_type = other DNA
agaagataaatttgtagata

SEQ ID NO: 2426 - DNA, 20 bp, synthetic construct
  source 1..20: mol_type = other DNA
cagtttcactaggttctcaa

SEQ ID NO: 2427 - DNA, 20 bp, synthetic construct
  source 1..20: mol_type = other DNA
attctgtttagctttccatt

SEQ ID NO: 2428 - DNA, 20 bp, synthetic construct
  source 1..20: mol_type = other DNA
tttctacttttcccagtttg

SEQ ID NO: 2429 - DNA, 20 bp, synthetic construct
  source 1..20: mol_type = other DNA
caggattatgtataaatcaa

SEQ ID NO: 2430 - DNA, 20 bp, synthetic construct
  source 1..20: mol_type = other DNA
ttgagaatccacagatccag

SEQ ID NO: 2431 - DNA, 20 bp, synthetic construct
  source 1..20: mol_type = other DNA
gggattcttagcctttttct

SEQ ID NO: 2432 - DNA, 20 bp, synthetic construct
  source 1..20: mol_type = other DNA
aatgctacattttaatctta

SEQ ID NO: 2433 - DNA, 20 bp, synthetic construct
  source 1..20: mol_type = other DNA
cccatagggtaccacctact

SEQ ID NO: 2434 - DNA, 20 bp, synthetic construct
  source 1..20: mol_type = other DNA
accgtctcacacagaccttg

SEQ ID NO: 2435 - DNA, 20 bp, synthetic construct
  source 1..20: mol_type = other DNA
ttagcatgacatgccaagtc

SEQ ID NO: 2436 - DNA, 20 bp, synthetic construct
  source 1..20: mol_type = other DNA
atggctccaatatcggcaat

SEQ ID NO: 2437 - DNA, 20 bp, synthetic construct
  source 1..20: mol_type = other DNA
gtgctcattctcatcccact

SEQ ID NO: 2438 - DNA, 20 bp, synthetic construct
  source 1..20: mol_type = other DNA
cacataggttagaattttcc

SEQ ID NO: 2439 - DNA, 20 bp, synthetic construct
  source 1..20: mol_type = other DNA
acaagatatattcaacctag

SEQ ID NO: 2440 - DNA, 20 bp, synthetic construct
  source 1..20: mol_type = other DNA
tcatatatttctcagccccc

SEQ ID NO: 2441 - DNA, 20 bp, synthetic construct
  source 1..20: mol_type = other DNA
aagcaagtcccatttaagta

SEQ ID NO: 2442 - DNA, 20 bp, synthetic construct
  source 1..20: mol_type = other DNA
atctatgattttcatcaggt

SEQ ID NO: 2443 - DNA, 20 bp, synthetic construct
  source 1..20: mol_type = other DNA
atataacatacactagataa

SEQ ID NO: 2444 - DNA, 20 bp, synthetic construct
  source 1..20: mol_type = other DNA
ttgaggacagtcatttgatt

SEQ ID NO: 2445 - DNA, 20 bp, synthetic construct
  source 1..20: mol_type = other DNA
cacctgacagaacaaatgat

SEQ ID NO: 2446 - DNA, 20 bp, synthetic construct
  source 1..20: mol_type = other DNA
agaacaccacaaatagctac

SEQ ID NO: 2447 - DNA, 20 bp, synthetic construct
  source 1..20: mol_type = other DNA
taagactttttatgttgctc

SEQ ID NO: 2448 - DNA, 20 bp, synthetic construct
  source 1..20: mol_type = other DNA
atgtatagaggccaacattc

SEQ ID NO: 2449 - DNA, 20 bp, synthetic construct
  source 1..20: mol_type = other DNA
aacaagctaaagagaaacct

SEQ ID NO: 2450 - DNA, 20 bp, synthetic construct
  source 1..20: mol_type = other DNA
gtctctcaatagcagaaatg

SEQ ID NO: 2451 - DNA, 20 bp, synthetic construct
  source 1..20: mol_type = other DNA
tgggcagtctatacggaatt

SEQ ID NO: 2452 - DNA, 20 bp, synthetic construct
  source 1..20: mol_type = other DNA
cgaaaattaagagttttagt

SEQ ID NO: 2453 - DNA, 20 bp, synthetic construct
  source 1..20: mol_type = other DNA
acaaaaagttcccattgcat

SEQ ID NO: 2454 - DNA, 20 bp, synthetic construct
  source 1..20: mol_type = other DNA
aagcatgaaccttaagagaa

SEQ ID NO: 2455 - DNA, 20 bp, synthetic construct
  source 1..20: mol_type = other DNA
aaaagttaccacaatatgaa

SEQ ID NO: 2456 - DNA, 20 bp, synthetic construct
  source 1..20: mol_type = other DNA
gttacttattaccttcctgt

SEQ ID NO: 2457 - DNA, 20 bp, synthetic construct
  source 1..20: mol_type = other DNA
gttcatcttttccttcagat

SEQ ID NO: 2458 - DNA, 20 bp, synthetic construct
  source 1..20: mol_type = other DNA
ttttttgcttattattctca

SEQ ID NO: 2459 - DNA, 20 bp, synthetic construct
  source 1..20: mol_type = other DNA
ccatgtagttacatgtaacc

SEQ ID NO: 2460 - DNA, 20 bp, synthetic construct
  source 1..20: mol_type = other DNA
cccactgctcttcaaatgga

SEQ ID NO: 2461 - DNA, 20 bp, synthetic construct
  source 1..20: mol_type = other DNA
agagtagatgtgaggctggg

SEQ ID NO: 2462 - DNA, 20 bp, synthetic construct
  source 1..20: mol_type = other DNA
tgctgtccaagataatgacc

SEQ ID NO: 2463 - DNA, 20 bp, synthetic construct
  source 1..20: mol_type = other DNA
tttaatttgtaactaggttt

SEQ ID NO: 2464 - DNA, 20 bp, synthetic construct
  source 1..20: mol_type = other DNA
aagtagctaatacggtggac

SEQ ID NO: 2465 - DNA, 20 bp, synthetic construct
  source 1..20: mol_type = other DNA
ggagcatgtacacaaccgat

SEQ ID NO: 2466 - DNA, 20 bp, synthetic construct
  source 1..20: mol_type = other DNA
gaccaaaccggcttccctcc

SEQ ID NO: 2467 - DNA, 20 bp, synthetic construct
  source 1..20: mol_type = other DNA
ttctcatgtgcggcatcaag

SEQ ID NO: 2468 - DNA, 20 bp, synthetic construct
  source 1..20: mol_type = other DNA
tgtttcattgggtttaatat

SEQ ID NO: 2469 - DNA, 20 bp, synthetic construct
  source 1..20: mol_type = other DNA
gtgttcatgactttcaaggg

SEQ ID NO: 2470 - DNA, 20 bp, synthetic construct
  source 1..20: mol_type = other DNA
tacttcttttgctagctgat

SEQ ID NO: 2471 - DNA, 20 bp, synthetic construct
  source 1..20: mol_type = other DNA
cgagaacccctcccaacacg

SEQ ID NO: 2472 - DNA, 20 bp, synthetic construct
  source 1..20: mol_type = other DNA
gtttccttctccctttgaac

SEQ ID NO: 2473 - DNA, 20 bp, synthetic construct
  source 1..20: mol_type = other DNA
cttaataaccttagttttaa

SEQ ID NO: 2474 - DNA, 20 bp, synthetic construct
  source 1..20: mol_type = other DNA
taagtgaggagattctagaa

SEQ ID NO: 2475 - DNA, 20 bp, synthetic construct
  source 1..20: mol_type = other DNA
gtaacaattgtaaatccata

SEQ ID NO: 2476 - DNA, 20 bp, synthetic construct
  source 1..20: mol_type = other DNA
agagtttttgccttccattt

SEQ ID NO: 2477 - DNA, 20 bp, synthetic construct
  source 1..20: mol_type = other DNA
gcatgatcttgtgtatatat

SEQ ID NO: 2478 - DNA, 20 bp, synthetic construct
  source 1..20: mol_type = other DNA
tcacttgacacaacttcagg

SEQ ID NO: 2479 - DNA, 20 bp, synthetic construct
  source 1..20: mol_type = other DNA
attacaatgcggtatatata

SEQ ID NO: 2480 - DNA, 20 bp, synthetic construct
  source 1..20: mol_type = other DNA
tgaccaagcagttaagtgcc

SEQ ID NO: 2481 - DNA, 20 bp, synthetic construct
  source 1..20: mol_type = other DNA
catcattacgaccattctgc

SEQ ID NO: 2482 - DNA, 20 bp, synthetic construct
  source 1..20: mol_type = other DNA
acagtttagcaattactttt

SEQ ID NO: 2483 - DNA, 20 bp, synthetic construct
  source 1..20: mol_type = other DNA
gcaaatatttccaaacaagt

SEQ ID NO: 2484 - DNA, 20 bp, synthetic construct
  source 1..20: mol_type = other DNA
aaaggcaatttccttaattt

SEQ ID NO: 2485 - DNA, 20 bp, synthetic construct
  source 1..20: mol_type = other DNA
gctcccagccttcttcactg

SEQ ID NO: 2486 - DNA, 20 bp, synthetic construct
  source 1..20: mol_type = other DNA
ttgttcagtgtccttctagc

SEQ ID NO: 2487 - DNA, 20 bp, synthetic construct
  source 1..20: mol_type = other DNA
ctcgaatggcagaacaatga

SEQ ID NO: 2488 - DNA, 20 bp, synthetic construct
  source 1..20: mol_type = other DNA
gtaatattccatacagatcg

SEQ ID NO: 2489 - DNA, 20 bp, synthetic construct
  source 1..20: mol_type = other DNA
gacttcttgttgttgtttac

SEQ ID NO: 2490 - DNA, 20 bp, synthetic construct
  source 1..20: mol_type = other DNA
tcttccaatttcagacttct

SEQ ID NO: 2491 - DNA, 20 bp, synthetic construct
  source 1..20: mol_type = other DNA
tatgtttgtctgtcttattc

SEQ ID NO: 2492 - DNA, 20 bp, synthetic construct
  source 1..20: mol_type = other DNA
atgtgctctctttgcgcctg

SEQ ID NO: 2493 - DNA, 20 bp, synthetic construct
  source 1..20: mol_type = other DNA
catgaatcagtatttactac

SEQ ID NO: 2494 - DNA, 20 bp, synthetic construct
  source 1..20: mol_type = other DNA
gggactagagcatccataaa

SEQ ID NO: 2495 - DNA, 20 bp, synthetic construct
  source 1..20: mol_type = other DNA
tgcttttaatagttgccaaa

SEQ ID NO: 2496 - DNA, 20 bp, synthetic construct
  source 1..20: mol_type = other DNA
tacccccaaggcagtttatc

SEQ ID NO: 2497 - DNA, 20 bp, synthetic construct
  source 1..20: mol_type = other DNA
gaactcttgaaattcttcag

SEQ ID NO: 2498 - DNA, 20 bp, synthetic construct
  source 1..20: mol_type = other DNA
ggtaccagttcttatatgcc

SEQ ID NO: 2499 - DNA, 20 bp, synthetic construct
  source 1..20: mol_type = other DNA
tactccaaacctttacaaaa

SEQ ID NO: 2500 - DNA, 20 bp, synthetic construct
  source 1..20: mol_type = other DNA
atttgagaagattcaaaaac

SEQ ID NO: 2501 - DNA, 20 bp, synthetic construct
  source 1..20: mol_type = other DNA
cttaataatttgacagacta

SEQ ID NO: 2502 - DNA, 20 bp, synthetic construct
  source 1..20: mol_type = other DNA
actaaaaccagaggaaaaat

SEQ ID NO: 2503 - DNA, 20 bp, synthetic construct
  source 1..20: mol_type = other DNA
acacagtttcactaggttct

SEQ ID NO: 2504 - DNA, 20 bp, synthetic construct
  source 1..20: mol_type = other DNA
agttattgttctgactttgg

SEQ ID NO: 2505 - DNA, 20 bp, synthetic construct
  source 1..20: mol_type = other DNA
gcaagctgatagacaatcat

SEQ ID NO: 2506 - DNA, 20 bp, synthetic construct
  source 1..20: mol_type = other DNA
taaacaacagtggccactga

SEQ ID NO: 2507 - DNA, 20 bp, synthetic construct
  source 1..20: mol_type = other DNA
gttctataggtgcttaagtc

SEQ ID NO: 2508 - DNA, 20 bp, synthetic construct
  source 1..20: mol_type = other DNA
cacagttaagggtgcaggat

SEQ ID NO: 2509 - DNA, 20 bp, synthetic construct
  source 1..20: mol_type = other DNA
aaattaaagctcgaagcagc

SEQ ID NO: 2510 - DNA, 20 bp, synthetic construct
  source 1..20: mol_type = other DNA
gggcaatgatggcactagga

SEQ ID NO: 2511 - DNA, 20 bp, synthetic construct
  source 1..20: mol_type = other DNA
tacctaagctatattaaagg

SEQ ID NO: 2512 - DNA, 20 bp, synthetic construct
  source 1..20: mol_type = other DNA
tcaccccatctccttccaac

SEQ ID NO: 2513 - DNA, 20 bp, synthetic construct
  source 1..20: mol_type = other DNA
catggctccaatatcggcaa

SEQ ID NO: 2514 - DNA, 20 bp, synthetic construct
  source 1..20: mol_type = other DNA
tctaacctctggactgtccc

SEQ ID NO: 2515 - DNA, 20 bp, synthetic construct
  source 1..20: mol_type = other DNA
gcacataggttagaattttc

SEQ ID NO: 2516 - DNA, 20 bp, synthetic construct
  source 1..20: mol_type = other DNA
tatccctgatttatggaaaa

SEQ ID NO: 2517 - DNA, 20 bp, synthetic construct
  source 1..20: mol_type = other DNA
atcatatatttctcagcccc

SEQ ID NO: 2518 - DNA, 20 bp, synthetic construct
  source 1..20: mol_type = other DNA
gaatcttattaagcaagtcc

SEQ ID NO: 2519 - DNA, 20 bp, synthetic construct
  source 1..20: mol_type = other DNA
ccttacaattatctatgatt

SEQ ID NO: 2520 - DNA, 20 bp, synthetic construct
  source 1..20: mol_type = other DNA
ctatacacactattgaagaa

SEQ ID NO: 2521 - DNA, 20 bp, synthetic construct
  source 1..20: mol_type = other DNA
ttttaaccctttgaggacag

SEQ ID NO: 2522 - DNA, 20 bp, synthetic construct
  source 1..20: mol_type = other DNA
acacctgacagaacaaatga

SEQ ID NO: 2523 - DNA, 20 bp, synthetic construct
  source 1..20: mol_type = other DNA
caactcctaggtaggtacac

SEQ ID NO: 2524 - DNA, 20 bp, synthetic construct
  source 1..20: mol_type = other DNA
ataagactttttatgttgct

SEQ ID NO: 2525 - DNA, 20 bp, synthetic construct
  source 1..20: mol_type = other DNA
aaacactttataggcaatat

SEQ ID NO: 2526 - DNA, 20 bp, synthetic construct
  source 1..20: mol_type = other DNA
aatcagtttattgaaggaat

SEQ ID NO: 2527 - DNA, 20 bp, synthetic construct
  source 1..20: mol_type = other DNA
gagactgcaataattattag

SEQ ID NO: 2528 - DNA, 20 bp, synthetic construct
  source 1..20: mol_type = other DNA
gtttctcagtaaagtgtcag

SEQ ID NO: 2529 - DNA, 20 bp, synthetic construct
  source 1..20: mol_type = other DNA
acccactttcttctcagaat

SEQ ID NO: 2530 - DNA, 20 bp, synthetic construct
  source 1..20: mol_type = other DNA
caaaagcattactcattgcc

SEQ ID NO: 2531 - DNA, 20 bp, synthetic construct
  source 1..20: mol_type = other DNA
atacaatacagtcaactgaa

SEQ ID NO: 2532 - DNA, 20 bp, synthetic construct
  source 1..20: mol_type = other DNA
aaaaactaagggaaaaactg

SEQ ID NO: 2533 - DNA, 20 bp, synthetic construct
  source 1..20: mol_type = other DNA
ttgttacttattaccttcct

SEQ ID NO: 2534 - DNA, 20 bp, synthetic construct
  source 1..20: mol_type = other DNA
gtagaaactatttgccaaaa

SEQ ID NO: 2535 - DNA, 20 bp, synthetic construct
  source 1..20: mol_type = other DNA
aagttgatctacacaaattt

SEQ ID NO: 2536 - DNA, 20 bp, synthetic construct
  source 1..20: mol_type = other DNA
cccatgtagttacatgtaac

SEQ ID NO: 2537 - DNA, 20 bp, synthetic construct
  source 1..20: mol_type = other DNA
gttttgtttgcaacatttcc

SEQ ID NO: 2538 - DNA, 20 bp, synthetic construct
  source 1..20: mol_type = other DNA
tatttgagtgtatttaaata

SEQ ID NO: 2539 - DNA, 20 bp, synthetic construct
  source 1..20: mol_type = other DNA
taccttaaaagttcatttcc

SEQ ID NO: 2540 - DNA, 20 bp, synthetic construct
  source 1..20: mol_type = other DNA
tgtttaatttgtaactaggt

SEQ ID NO: 2541 - DNA, 20 bp, synthetic construct
  source 1..20: mol_type = other DNA
tctgaatgtttttaagagta

SEQ ID NO: 2542 - DNA, 20 bp, synthetic construct
  source 1..20: mol_type = other DNA
gaaagttggctaaagctggt

SEQ ID NO: 2543 - DNA, 20 bp, synthetic construct
  source 1..20: mol_type = other DNA
ctggcccacacggaccaaac

SEQ ID NO: 2544 - DNA, 20 bp, synthetic construct
  source 1..20: mol_type = other DNA
tctgtacttttctcatgtgc

SEQ ID NO: 2545 - DNA, 20 bp, synthetic construct
  source 1..20: mol_type = other DNA
aagctaggtgatgtttcatt

SEQ ID NO: 2546 - DNA, 20 bp, synthetic construct
  source 1..20: mol_type = other DNA
gatgtgttcatgactttcaa

SEQ ID NO: 2547 - DNA, 20 bp, synthetic construct
  source 1..20: mol_type = other DNA
tgttacttcttttgctagct

SEQ ID NO: 2548 - DNA, 20 bp, synthetic construct
  source 1..20: mol_type = other DNA
cgatctttcccaggactcgg

SEQ ID NO: 2549 - DNA, 20 bp, synthetic construct
  source 1..20: mol_type = other DNA
agtgtttgggatgcttcaga

SEQ ID NO: 2550 - DNA, 20 bp, synthetic construct
  source 1..20: mol_type = other DNA
aacttaataaccttagtttt

SEQ ID NO: 2551 - DNA, 20 bp, synthetic construct
  source 1..20: mol_type = other DNA
cacttctgaaagtcatgaaa

SEQ ID NO: 2552 - DNA, 20 bp, synthetic construct
  source 1..20: mol_type = other DNA
aatttaaatggaagcatgat

SEQ ID NO: 2553 - DNA, 20 bp, synthetic construct
  source 1..20: mol_type = other DNA
ttagagtttttgccttccat

SEQ ID NO: 2554 - DNA, 20 bp, synthetic construct
  source 1..20: mol_type = other DNA
acagcatgatcttgtgtata

SEQ ID NO: 2555 - DNA, 20 bp, synthetic construct
  source 1..20: mol_type = other DNA
gttagctattaatcatggca

SEQ ID NO: 2556 - DNA, 20 bp, synthetic construct
  source 1..20: mol_type = other DNA
gaattacaatgcggtatata

SEQ ID NO: 2557 - DNA, 20 bp, synthetic construct
  source 1..20: mol_type = other DNA
ccagtatctcagtttttttt

SEQ ID NO: 2558 - DNA, 20 bp, synthetic construct
  source 1..20: mol_type = other DNA
gcgcatcattacgaccattc

SEQ ID NO: 2559 - DNA, 20 bp, synthetic construct
  source 1..20: mol_type = other DNA
atttttactcaccttttcta

SEQ ID NO: 2560 - DNA, 20 bp, synthetic construct
  source 1..20: mol_type = other DNA
ataaacacagggtaggccag

SEQ ID NO: 2561 - DNA, 20 bp, synthetic construct
  source 1..20: mol_type = other DNA
ctttgaaatctcacaaggtt

SEQ ID NO: 2562 - DNA, 20 bp, synthetic construct
  source 1..20: mol_type = other DNA
ggattgttttcttcattatt

SEQ ID NO: 2563 - DNA, 20 bp, synthetic construct
  source 1..20: mol_type = other DNA
tcttgttcagtgtccttcta

SEQ ID NO: 2564 - DNA, 20 bp, synthetic construct
  source 1..20: mol_type = other DNA
aaataacttgccttacatca

SEQ ID NO: 2565 - DNA, 20 bp, synthetic construct
  source 1..20: mol_type = other DNA
aagtaatattccatacagat

SEQ ID NO: 2566 - DNA, 20 bp, synthetic construct
  source 1..20: mol_type = other DNA
cagacttcttgttgttgttt

SEQ ID NO: 2567 - DNA, 20 bp, synthetic construct
  source 1..20: mol_type = other DNA
gttcttccaatttcagactt

SEQ ID NO: 2568 - DNA, 20 bp, synthetic construct
  source 1..20: mol_type = other DNA
aaatgttttcataactgcta

SEQ ID NO: 2569 - DNA, 20 bp, synthetic construct
  source 1..20: mol_type = other DNA
acatgtgctctctttgcgcc

SEQ ID NO: 2570 - DNA, 20 bp, synthetic construct
  source 1..20: mol_type = other DNA
aacaaccaagcttggcaaaa

SEQ ID NO: 2571 - DNA, 20 bp, synthetic construct
  source 1..20: mol_type = other DNA
gagggactagagcatccata

SEQ ID NO: 2572 - DNA, 20 bp, synthetic construct
  source 1..20: mol_type = other DNA
ccactgaagtctaaattctt

SEQ ID NO: 2573 - DNA, 20 bp, synthetic construct
  source 1..20: mol_type = other DNA
tttatccacattttaacttc

SEQ ID NO: 2574 - DNA, 20 bp, synthetic construct
  source 1..20: mol_type = other DNA
ttcactaacaaaacaataaa

SEQ ID NO: 2575 - DNA, 20 bp, synthetic construct
  source 1..20: mol_type = other DNA
catcaaggtaccagttctta

SEQ ID NO: 2576 - DNA, 20 bp, synthetic construct
  source 1..20: mol_type = other DNA
atttttctctaaagttctaa

SEQ ID NO: 2577 - DNA, 20 bp, synthetic construct
  source 1..20: mol_type = other DNA
aggaatggactatcacaaac

SEQ ID NO: 2578 - DNA, 20 bp, synthetic construct
  source 1..20: mol_type = other DNA
ttccccagcagccgagtgtg

SEQ ID NO: 2579 - DNA, 20 bp, synthetic construct
  source 1..20: mol_type = other DNA
taatggctagaagaattcag

SEQ ID NO: 2580 - DNA, 20 bp, synthetic construct
  source 1..20: mol_type = other DNA
gtacacagtttcactaggtt

SEQ ID NO: 2581 - DNA, 20 bp, synthetic construct
  source 1..20: mol_type = other DNA
cacacagtatttttttatcg

SEQ ID NO: 2582 - DNA, 20 bp, synthetic construct
  source 1..20: mol_type = other DNA
ctacttgttttacttaaacc

SEQ ID NO: 2583 - DNA, 20 bp, synthetic construct
  source 1..20: mol_type = other DNA
tccagaaaagtttaatgcat

SEQ ID NO: 2584 - DNA, 20 bp, synthetic construct
  source 1..20: mol_type = other DNA
gagttctataggtgcttaag

SEQ ID NO: 2585 - DNA, 20 bp, synthetic construct
  source 1..20: mol_type = other DNA
ctatataaagtatcagtata

SEQ ID NO: 2586 - DNA, 20 bp, synthetic construct
  source 1..20: mol_type = other DNA
aacctaccttaagatcctga

SEQ ID NO: 2587 - DNA, 20 bp, synthetic construct
  source 1..20: mol_type = other DNA
aagttcaggccctacagtat

SEQ ID NO: 2588 - DNA, 20 bp, synthetic construct
  source 1..20: mol_type = other DNA
ggattgctcaccgtgatata

SEQ ID NO: 2589 - DNA, 20 bp, synthetic construct
  source 1..20: mol_type = other DNA
gtctcagccagtcctcaatg

SEQ ID NO: 2590 - DNA, 20 bp, synthetic construct
  source 1..20: mol_type = other DNA
tttcatggctccaatatcgg

SEQ ID NO: 2591 - DNA, 20 bp, synthetic construct
  source 1..20: mol_type = other DNA
tggtcaaaatacttgcctcc

SEQ ID NO: 2592 - DNA, 20 bp, synthetic construct
  source 1..20: mol_type = other DNA
gttgcacataggttagaatt

SEQ ID NO: 2593 - DNA, 20 bp, synthetic construct
  source 1..20: mol_type = other DNA
cactcttttcccacaaagtt

SEQ ID NO: 2594 - DNA, 20 bp, synthetic construct
  source 1..20: mol_type = other DNA
agtatcatatatttctcagc

SEQ ID NO: 2595 - DNA, 20 bp, synthetic construct
  source 1..20: mol_type = other DNA
tggaatcttattaagcaagt

SEQ ID NO: 2596 - DNA, 20 bp, synthetic construct
  source 1..20: mol_type = other DNA
ttccttacaattatctatga

SEQ ID NO: 2597 - DNA, 20 bp, synthetic construct
  source 1..20: mol_type = other DNA
ttaattaggatctatacaca

SEQ ID NO: 2598 - DNA, 20 bp, synthetic construct
  source 1..20: mol_type = other DNA
cattttaaccctttgaggac

SEQ ID NO: 2599 - DNA, 20 bp, synthetic construct
  source 1..20: mol_type = other DNA
agtaatgcttattttctaaa

SEQ ID NO: 2600 - DNA, 20 bp, synthetic construct
  source 1..20: mol_type = other DNA
aaacagtattttcttagata

SEQ ID NO: 2601 - DNA, 20 bp, synthetic construct
  source 1..20: mol_type = other DNA
agataagactttttatgttg

SEQ ID NO: 2602 - DNA, 20 bp, synthetic construct
  source 1..20: mol_type = other DNA
ttaactcatggcaaccaccg

SEQ ID NO: 2603 - DNA, 20 bp, synthetic construct
  source 1..20: mol_type = other DNA
tacatcttaacagaataaaa

SEQ ID NO: 2604 - DNA, 20 bp, synthetic construct
  source 1..20: mol_type = other DNA
ccctctaatgcatgtatggc

SEQ ID NO: 2605 - DNA, 20 bp, synthetic construct
  source 1..20: mol_type = other DNA
actataaactaacaataaca

SEQ ID NO: 2606 - DNA, 20 bp, synthetic construct
  source 1..20: mol_type = other DNA
cccattgcattgttttaagt

SEQ ID NO: 2607 - DNA, 20 bp, synthetic construct
  source 1..20: mol_type = other DNA
tgaaaatctaaggccacatg

SEQ ID NO: 2608 - DNA, 20 bp, synthetic construct
  source 1..20: mol_type = other DNA
agtatatgatgacctcaatg

SEQ ID NO: 2609 - DNA, 20 bp, synthetic construct
  source 1..20: mol_type = other DNA
actcctcactgaaagtacac

SEQ ID NO: 2610 - DNA, 20 bp, synthetic construct
  source 1..20: mol_type = other DNA
ctttgttacttattaccttc

SEQ ID NO: 2611 - DNA, 20 bp, synthetic construct
  source 1..20: mol_type = other DNA
attattctcacatataaata

SEQ ID NO: 2612 - DNA, 20 bp, synthetic construct
  source 1..20: mol_type = other DNA
tttgaagcaatccattaatt

SEQ ID NO: 2613 - DNA, 20 bp, synthetic construct
  source 1..20: mol_type = other DNA
tgcccatgtagttacatgta

SEQ ID NO: 2614 - DNA, 20 bp, synthetic construct
  source 1..20: mol_type = other DNA
aagggaatcttgattaacta

SEQ ID NO: 2615 - DNA, 20 bp, synthetic construct
  source 1..20: mol_type = other DNA
cacacaattttgcaaaaaca

SEQ ID NO: 2616 - DNA, 20 bp, synthetic construct
  source 1..20: mol_type = other DNA
tgacaatattaatggcacaa

SEQ ID NO: 2617 - DNA, 20 bp, synthetic construct
  source 1..20: mol_type = other DNA
tgtgtttaatttgtaactag

SEQ ID NO: 2618 - DNA, 20 bp, synthetic construct
  source 1..20: mol_type = other DNA
agcacagctttgggaagagg

SEQ ID NO: 2619 - DNA, 20 bp, synthetic construct
  source 1..20: mol_type = other DNA
tcccatgacaaaaccacaca

SEQ ID NO: 2620 - DNA, 20 bp, synthetic construct
  source 1..20: mol_type = other DNA
ccagcctctggtagacacct

SEQ ID NO: 2621 - DNA, 20 bp, synthetic construct
  source 1..20: mol_type = other DNA
ctgctgtgtatttttcttcc

SEQ ID NO: 2622 - DNA, 20 bp, synthetic construct
  source 1..20: mol_type = other DNA
ttgtctccttgttgtatggt

SEQ ID NO: 2623 - DNA, 20 bp, synthetic construct
  source 1..20: mol_type = other DNA
agctgatgtgttcatgactt

SEQ ID NO: 2624 - DNA, 20 bp, synthetic construct
  source 1..20: mol_type = other DNA
actacaaccccggcttagga

SEQ ID NO: 2625 - DNA, 20 bp, synthetic construct
  source 1..20: mol_type = other DNA
agtagtgtttgggatgcttc

SEQ ID NO: 2626 - DNA, 20 bp, synthetic construct
  source 1..20: mol_type = other DNA
atgcaacttaataaccttag

SEQ ID NO: 2627 - DNA, 20 bp, synthetic construct
  source 1..20: mol_type = other DNA
cccaacaatagaatggttaa

SEQ ID NO: 2628 - DNA, 20 bp, synthetic construct
  source 1..20: mol_type = other DNA
taggctggtaatttaatgtc

SEQ ID NO: 2629 - DNA, 20 bp, synthetic construct
  source 1..20: mol_type = other DNA
aagcttagagtttttgcctt

SEQ ID NO: 2630 - DNA, 20 bp, synthetic construct
  source 1..20: mol_type = other DNA
tacacagcatgatcttgtgt

SEQ ID NO: 2631 - DNA, 20 bp, synthetic construct
  source 1..20: mol_type = other DNA
tacttgctgccaatatgtac

SEQ ID NO: 2632 - DNA, 20 bp, synthetic construct
  source 1..20: mol_type = other DNA
ttttgaattacaatgcggta

SEQ ID NO: 2633 - DNA, 20 bp, synthetic construct
  source 1..20: mol_type = other DNA
cggccagtatctcagttttt

SEQ ID NO: 2634 - DNA, 20 bp, synthetic construct
  source 1..20: mol_type = other DNA
tgtgcgcatcattacgacca

SEQ ID NO: 2635 - DNA, 20 bp, synthetic construct
  source 1..20: mol_type = other DNA
ctgtatttttactcaccttt

SEQ ID NO: 2636 - DNA, 20 bp, synthetic construct
  source 1..20: mol_type = other DNA
agtaaacatcagcatctcaa

SEQ ID NO: 2637 - DNA, 20 bp, synthetic construct
  source 1..20: mol_type = other DNA
agactttgaaatctcacaag

SEQ ID NO: 2638 - DNA, 20 bp, synthetic construct
  source 1..20: mol_type = other DNA
caccggattgttttcttcat

SEQ ID NO: 2639 - DNA, 20 bp, synthetic construct
  source 1..20: mol_type = other DNA
gaagtcttgttcagtgtcct

SEQ ID NO: 2640 - DNA, 20 bp, synthetic construct
  source 1..20: mol_type = other DNA
ttcatatcacctctgactta

SEQ ID NO: 2641 - DNA, 20 bp, synthetic construct
  source 1..20: mol_type = other DNA
tgaatattttctccctaaaa

SEQ ID NO: 2642 - DNA, 20 bp, synthetic construct
  source 1..20: mol_type = other DNA
atttcagacttcttgttgtt

SEQ ID NO: 2643 - DNA, 20 bp, synthetic construct
  source 1..20: mol_type = other DNA
ttttgttcttccaatttcag

SEQ ID NO: 2644 - DNA, 20 bp, synthetic construct
  source 1..20: mol_type = other DNA
tctttgcgcctgtgtcacat

SEQ ID NO: 2645 - DNA, 20 bp, synthetic construct
  source 1..20: mol_type = other DNA
agtatttactacttctgcat

SEQ ID NO: 2646 - DNA, 20 bp, synthetic construct
  source 1..20: mol_type = other DNA
tgaaaatcagaaaatgatgc

SEQ ID NO: 2647 - DNA, 20 bp, synthetic construct
  source 1..20: mol_type = other DNA
tttatgagggactagagcat

SEQ ID NO: 2648 - DNA, 20 bp, synthetic construct
  source 1..20: mol_type = other DNA
aagtacttcacatgcaacat

SEQ ID NO: 2649 - DNA, 20 bp, synthetic construct
  source 1..20: mol_type = other DNA
cagaggaccaactgtacttt

SEQ ID NO: 2650 - DNA, 20 bp, synthetic construct
  source 1..20: mol_type = other DNA
gtggctttaaaaactaggta

SEQ ID NO: 2651 - DNA, 20 bp, synthetic construct
  source 1..20: mol_type = other DNA
gctcatcaaggtaccagttc

SEQ ID NO: 2652 - DNA, 20 bp, synthetic construct
  source 1..20: mol_type = other DNA
tcttccttagccttatactt

SEQ ID NO: 2653 - DNA, 20 bp, synthetic construct
  source 1..20: mol_type = other DNA
agagacctgatgtcctaaac

SEQ ID NO: 2654 - DNA, 20 bp, synthetic construct
  source 1..20: mol_type = other DNA
atagctatgctacaataaaa

SEQ ID NO: 2655 - DNA, 20 bp, synthetic construct
  source 1..20: mol_type = other DNA
attctttccataaaataatg

SEQ ID NO: 2656 - DNA, 20 bp, synthetic construct
  source 1..20: mol_type = other DNA
acaattatttgcatcgctga

SEQ ID NO: 2657 - DNA, 20 bp, synthetic construct
  source 1..20: mol_type = other DNA
ttatttatcagtgtgaagta

SEQ ID NO: 2658 - DNA, 20 bp, synthetic construct
  source 1..20: mol_type = other DNA
ccctggcaaatatgtaaaac

SEQ ID NO: 2659 - DNA, 20 bp, synthetic construct
  source 1..20: mol_type = other DNA
tttaatcattgtctatggta

SEQ ID NO: 2660 - DNA, 20 bp, synthetic construct
  source 1..20: mol_type = other DNA
aactgagttctataggtgct

SEQ ID NO: 2661 - DNA, 20 bp, synthetic construct
  source 1..20: mol_type = other DNA
ataatgcctctgaaaaatca

SEQ ID NO: 2662 - DNA, 20 bp, synthetic construct
  source 1..20: mol_type = other DNA
gagcagcaggactcagctgg

SEQ ID NO: 2663 - DNA, 20 bp, synthetic construct
  source 1..20: mol_type = other DNA
ttaagccacacgaagcattt

SEQ ID NO: 2664 - DNA, 20 bp, synthetic construct
  source 1..20: mol_type = other DNA
actctacaggttatgctagc

SEQ ID NO: 2665 - DNA, 20 bp, synthetic construct
  source 1..20: mol_type = other DNA
tcctctctctcttaccagta

SEQ ID NO: 2666 - DNA, 20 bp, synthetic construct
  source 1..20: mol_type = other DNA
gtttttcatggctccaatat

SEQ ID NO: 2667 - DNA, 20 bp, synthetic construct
  source 1..20: mol_type = other DNA
cacattcatatcagttatgt

SEQ ID NO: 2668 - DNA, 20 bp, synthetic construct
  source 1..20: mol_type = other DNA
agtgttgcacataggttaga

SEQ ID NO: 2669 - DNA, 20 bp, synthetic construct
  source 1..20: mol_type = other DNA
actcaagagtgtccatttgg

SEQ ID NO: 2670 - DNA, 20 bp, synthetic construct
  source 1..20: mol_type = other DNA
cttaagtatcatatatttct

SEQ ID NO: 2671 - DNA, 20 bp, synthetic construct
  source 1..20: mol_type = other DNA
agtttggaatcttattaagc

SEQ ID NO: 2672 - DNA, 20 bp, synthetic construct
  source 1..20: mol_type = other DNA
gctggttccttacaattatc

SEQ ID NO: 2673 - DNA, 20 bp, synthetic construct
  source 1..20: mol_type = other DNA
gggttaattaggatctatac

SEQ ID NO: 2674 - DNA, 20 bp, synthetic construct
  source 1..20: mol_type = other DNA
tgtacattttaaccctttga

SEQ ID NO: 2675 - DNA, 20 bp, synthetic construct
  source 1..20: mol_type = other DNA
attggttggtctcaaaatct

SEQ ID NO: 2676 - DNA, 20 bp, synthetic construct
  source 1..20: mol_type = other DNA
cattaatgaaggtttacaga

SEQ ID NO: 2677 - DNA, 20 bp, synthetic construct
  source 1..20: mol_type = other DNA
aaacataagagaataacatt

SEQ ID NO: 2678 - DNA, 20 bp, synthetic construct
  source 1..20: mol_type = other DNA
gcatttcttactatgggttg

SEQ ID NO: 2679 - DNA, 20 bp, synthetic construct
  source 1..20: mol_type = other DNA
ataacactagaggccgggca

SEQ ID NO: 2680 - DNA, 20 bp, synthetic construct
  source 1..20: mol_type = other DNA
agggaaatacctagtcctag

SEQ ID NO: 2681 - DNA, 20 bp, synthetic construct
  source 1..20: mol_type = other DNA
tatcaggcatggagccactg

SEQ ID NO: 2682 - DNA, 20 bp, synthetic construct
  source 1..20: mol_type = other DNA
gttcccattgcattgtttta

SEQ ID NO: 2683 - DNA, 20 bp, synthetic construct
  source 1..20: mol_type = other DNA
ccaattctaggtatttaact

SEQ ID NO: 2684 - DNA, 20 bp, synthetic construct
  source 1..20: mol_type = other DNA
agtaatgcaccagtacaata

SEQ ID NO: 2685 - DNA, 20 bp, synthetic construct
  source 1..20: mol_type = other DNA
ccaatacctcaaaggattgg

SEQ ID NO: 2686 - DNA, 20 bp, synthetic construct
  source 1..20: mol_type = other DNA
ttcctcacacatttcttaca

SEQ ID NO: 2687 - DNA, 20 bp, synthetic construct
  source 1..20: mol_type = other DNA
cttattattctcacatataa

SEQ ID NO: 2688 - DNA, 20 bp, synthetic construct
  source 1..20: mol_type = other DNA
gttacatgtaaccataatct

SEQ ID NO: 2689 - DNA, 20 bp, synthetic construct
  source 1..20: mol_type = other DNA
ttgaaagtgataatgtggaa

SEQ ID NO: 2690 - DNA, 20 bp, synthetic construct
  source 1..20: mol_type = other DNA
atgatgtagcttaaaaagaa

SEQ ID NO: 2691 - DNA, 20 bp, synthetic construct
  source 1..20: mol_type = other DNA
actgtacaattaaaaattag

SEQ ID NO: 2692 - DNA, 20 bp, synthetic construct
  source 1..20: mol_type = other DNA
attaaggaccttagctactt

SEQ ID NO: 2693 - DNA, 20 bp, synthetic construct
  source 1..20: mol_type = other DNA
atcagtcaaaaatccttaat

SEQ ID NO: 2694 - DNA, 20 bp, synthetic construct
  source 1..20: mol_type = other DNA
aaccttggtacaaaaaccat

SEQ ID NO: 2695 - DNA, 20 bp, synthetic construct
  source 1..20: mol_type = other DNA
caatgtccaaggccaagccc

SEQ ID NO: 2696 - DNA, 20 bp, synthetic construct
  source 1..20: mol_type = other DNA
aaaggtgattttagtcagcc

SEQ ID NO: 2697 - DNA, 20 bp, synthetic construct
  source 1..20: mol_type = other DNA
tagctgatgtgttcatgact

SEQ ID NO: 2698 - DNA, 20 bp, synthetic construct
  source 1..20: mol_type = other DNA
actgctgtgtatttttcttc

SEQ ID NO: 2699 - DNA, 20 bp, synthetic construct
  source 1..20: mol_type = other DNA
cattggcgcatgggcagttg

SEQ ID NO: 2700 - DNA, 20 bp, synthetic construct
  source 1..20: mol_type = other DNA
tgcacaaacacaccctcgag

SEQ ID NO: 2701 - DNA, 20 bp, synthetic construct
  source 1..20: mol_type = other DNA
taagtagtgtttgggatgct

SEQ ID NO: 2702 - DNA, 20 bp, synthetic construct
  source 1..20: mol_type = other DNA
aatgcaacttaataacctta

SEQ ID NO: 2703 - DNA, 20 bp, synthetic construct
  source 1..20: mol_type = other DNA
ctgaagccctctgaactagt

SEQ ID NO: 2704 - DNA, 20 bp, synthetic construct
  source 1..20: mol_type = other DNA
cattgctaattagagtaaca

SEQ ID NO: 2705 - DNA, 20 bp, synthetic construct
  source 1..20: mol_type = other DNA
aaagcttagagtttttgcct

SEQ ID NO: 2706 - DNA, 20 bp, synthetic construct
  source 1..20: mol_type = other DNA
atacacagcatgatcttgtg

SEQ ID NO: 2707 - DNA, 20 bp, synthetic construct
  source 1..20: mol_type = other DNA
gtctttcaactttctatcac

SEQ ID NO: 2708 - DNA, 20 bp, synthetic construct
  source 1..20: mol_type = other DNA
attttgaattacaatgcggt

SEQ ID NO: 2709 - DNA, 20 bp, synthetic construct
  source 1..20: mol_type = other DNA
aataagccatgatcacaata

SEQ ID NO: 2710 - DNA, 20 bp, synthetic construct
  source 1..20: mol_type = other DNA
ggcctatgcctttaccgcca

SEQ ID NO: 2711 - DNA, 20 bp, synthetic construct
  source 1..20: mol_type = other DNA
cgctgtatttttactcacct

SEQ ID NO: 2712 - DNA, 20 bp, synthetic construct
  source 1..20: mol_type = other DNA
tcagaaagcttctcaaacat

SEQ ID NO: 2713 - DNA, 20 bp, synthetic construct
  source 1..20: mol_type = other DNA
aagactttgaaatctcacaa

SEQ ID NO: 2714 - DNA, 20 bp, synthetic construct
  source 1..20: mol_type = other DNA
tcaccggattgttttcttca

SEQ ID NO: 2715 - DNA, 20 bp, synthetic construct
  source 1..20: mol_type = other DNA
tgaagtcttgttcagtgtcc

SEQ ID NO: 2716 - DNA, 20 bp, synthetic construct
  source 1..20: mol_type = other DNA
tccatacagatcgcatagct

SEQ ID NO: 2717 - DNA, 20 bp, synthetic construct
  source 1..20: mol_type = other DNA
gttgttgtttacattattat

SEQ ID NO: 2718 - DNA, 20 bp, synthetic construct
  source 1..20: mol_type = other DNA
aatttcagacttcttgttgt

SEQ ID NO: 2719 - DNA, 20 bp, synthetic construct
  source 1..20: mol_type = other DNA
attttgttcttccaatttca

SEQ ID NO: 2720 - DNA, 20 bp, synthetic construct
  source 1..20: mol_type = other DNA
ctctttgcgcctgtgtcaca

SEQ ID NO: 2721 - DNA, 20 bp, synthetic construct
  source 1..20: mol_type = other DNA
cagtatttactacttctgca

SEQ ID NO: 2722 - DNA, 20 bp, synthetic construct
  source 1..20: mol_type = other DNA
ttcgattatctcaatcaaat

SEQ ID NO: 2723 - DNA, 20 bp, synthetic construct
  source 1..20: mol_type = other DNA
ttttatgagggactagagca

SEQ ID NO: 2724 - DNA, 20 bp, synthetic construct
  source 1..20: mol_type = other DNA
ttactacaaaaccagacacc

SEQ ID NO: 2725 - DNA, 20 bp, synthetic construct
  source 1..20: mol_type = other DNA
gaatatggaacccacagatg

SEQ ID NO: 2726 - DNA, 20 bp, synthetic construct
  source 1..20: mol_type = other DNA
gagaagtaaaatcattcaaa

SEQ ID NO: 2727 - DNA, 20 bp, synthetic construct
  source 1..20: mol_type = other DNA
tagctcatcaaggtaccagt

SEQ ID NO: 2728 - DNA, 20 bp, synthetic construct
  source 1..20: mol_type = other DNA
gtatgttctacttcttcacc

SEQ ID NO: 2729 - DNA, 20 bp, synthetic construct
  source 1..20: mol_type = other DNA
gaaaaccatgcggcctggcc

SEQ ID NO: 2730 - DNA, 20 bp, synthetic construct
  source 1..20: mol_type = other DNA
catagctatgctacaataaa

SEQ ID NO: 2731 - DNA, 20 bp, synthetic construct
  source 1..20: mol_type = other DNA
ggaacacatcccagagctct

SEQ ID NO: 2732 - DNA, 20 bp, synthetic construct
  source 1..20: mol_type = other DNA
aagaccaaaaagacaaccat

SEQ ID NO: 2733 - DNA, 20 bp, synthetic construct
  source 1..20: mol_type = other DNA
gtttaatcacagttttctca

SEQ ID NO: 2734 - DNA, 20 bp, synthetic construct
  source 1..20: mol_type = other DNA
ggaggaaaagctagctacct

SEQ ID NO: 2735 - DNA, 20 bp, synthetic construct
  source 1..20: mol_type = other DNA
aaagcaggatgctacaacgc

SEQ ID NO: 2736 - DNA, 20 bp, synthetic construct
  source 1..20: mol_type = other DNA
taactgagttctataggtgc

SEQ ID NO: 2737 - DNA, 20 bp, synthetic construct
  source 1..20: mol_type = other DNA
tcagcttctcaatctttcct

SEQ ID NO: 2738 - DNA, 20 bp, synthetic construct
  source 1..20: mol_type = other DNA
ctccaccagcagcactactc

SEQ ID NO: 2739 - DNA, 20 bp, synthetic construct
  source 1..20: mol_type = other DNA
tacggaatatatagtattca

SEQ ID NO: 2740 - DNA, 20 bp, synthetic construct
  source 1..20: mol_type = other DNA
taagtgtcaaagaccctatt

SEQ ID NO: 2741 - DNA, 20 bp, synthetic construct
  source 1..20: mol_type = other DNA
acaagcccacatatgcaatt

SEQ ID NO: 2742 - DNA, 20 bp, synthetic construct
  source 1..20: mol_type = other DNA
ctgttctttggtttttcatg

SEQ ID NO: 2743 - DNA, 20 bp, synthetic construct
  source 1..20: mol_type = other DNA
ttattatccagtgtttttaa

SEQ ID NO: 2744 - DNA, 20 bp, synthetic construct
  source 1..20: mol_type = other DNA
cagtgttgcacataggttag

SEQ ID NO: 2745 - DNA, 20 bp, synthetic construct
  source 1..20: mol_type = other DNA
tttcacccccaatattaagt

SEQ ID NO: 2746 - DNA, 20 bp, synthetic construct
  source 1..20: mol_type = other DNA
ggtctcctctccatagggtt

SEQ ID NO: 2747 - DNA, 20 bp, synthetic construct
  source 1..20: mol_type = other DNA
cagtttggaatcttattaag

SEQ ID NO: 2748 - DNA, 20 bp, synthetic construct
  source 1..20: mol_type = other DNA
tgctggttccttacaattat

SEQ ID NO: 2749 - DNA, 20 bp, synthetic construct
  source 1..20: mol_type = other DNA
aagggttaattaggatctat

SEQ ID NO: 2750 - DNA, 20 bp, synthetic construct
  source 1..20: mol_type = other DNA
ttgtacattttaaccctttg

SEQ ID NO: 2751 - DNA, 20 bp, synthetic construct
  source 1..20: mol_type = other DNA
attttcctttctaagaagct

SEQ ID NO: 2752 - DNA, 20 bp, synthetic construct
  source 1..20: mol_type = other DNA
tttttatgttgctccttctt

SEQ ID NO: 2753 - DNA, 20 bp, synthetic construct
  source 1..20: mol_type = other DNA
tggtacacaggaaatacgca

SEQ ID NO: 2754 - DNA, 20 bp, synthetic construct
  source 1..20: mol_type = other DNA
tgccaaggacttcggagttt

SEQ ID NO: 2755 - DNA, 20 bp, synthetic construct
  source 1..20: mol_type = other DNA
gctctcaaagatagacccta

SEQ ID NO: 2756 - DNA, 20 bp, synthetic construct
  source 1..20: mol_type = other DNA
gctcacagctctgggaggag

SEQ ID NO: 2757 - DNA, 20 bp, synthetic construct
  source 1..20: mol_type = other DNA
atctagcaaaccctcttctt

SEQ ID NO: 2758 - DNA, 20 bp, synthetic construct
  source 1..20: mol_type = other DNA
agttcccattgcattgtttt

SEQ ID NO: 2759 - DNA, 20 bp, synthetic construct
  source 1..20: mol_type = other DNA
atcagttggaatgtaaaatg

SEQ ID NO: 2760 - DNA, 20 bp, synthetic construct
  source 1..20: mol_type = other DNA
taaaaatgggagcatggcaa

SEQ ID NO: 2761 - DNA, 20 bp, synthetic construct
  source 1..20: mol_type = other DNA
aaagctagtcaagtatacta

SEQ ID NO: 2762 - DNA, 20 bp, synthetic construct
  source 1..20: mol_type = other DNA
ccagttcctccagcacgagc

SEQ ID NO: 2763 - DNA, 20 bp, synthetic construct
  source 1..20: mol_type = other DNA
gcttattattctcacatata

SEQ ID NO: 2764 - DNA, 20 bp, synthetic construct
  source 1..20: mol_type = other DNA
agttacatgtaaccataatc

SEQ ID NO: 2765 - DNA, 20 bp, synthetic construct
  source 1..20: mol_type = other DNA
ataaaccaagttagtttgtc

SEQ ID NO: 2766 - DNA, 20 bp, synthetic construct
  source 1..20: mol_type = other DNA
ttcttctgtttgcattaaat

SEQ ID NO: 2767 - DNA, 20 bp, synthetic construct
  source 1..20: mol_type = other DNA
catgtatcctttaaaaagtg

SEQ ID NO: 2768 - DNA, 20 bp, synthetic construct
  source 1..20: mol_type = other DNA
aagcagcagattaaattagc

SEQ ID NO: 2769 - DNA, 20 bp, synthetic construct
  source 1..20: mol_type = other DNA
aaaactttagtcttcataaa

SEQ ID NO: 2770 - DNA, 20 bp, synthetic construct
  source 1..20: mol_type = other DNA
ggacaacatgatgggccagt

SEQ ID NO: 2771 - DNA, 20 bp, synthetic construct
  source 1..20: mol_type = other DNA
tgcttccagcttctagttac

SEQ ID NO: 2772 - DNA, 20 bp, synthetic construct
  source 1..20: mol_type = other DNA
caccaggcagtgaaaagaga

SEQ ID NO: 2773 - DNA, 20 bp, synthetic construct
  source 1..20: mol_type = other DNA
aactgctgtgtatttttctt

SEQ ID NO: 2774 - DNA, 20 bp, synthetic construct
  source 1..20: mol_type = other DNA
attagcatcattggcgcatg

SEQ ID NO: 2775 - DNA, 20 bp, synthetic construct
  source 1..20: mol_type = other DNA
ctagctgatgtgttcatgac

SEQ ID NO: 2776 - DNA, 20 bp, synthetic construct
  source 1..20: mol_type = other DNA
gaactgacaaccgcccgcca

SEQ ID NO: 2777 - DNA, 20 bp, synthetic construct
  source 1..20: mol_type = other DNA
ctaagtagtgtttgggatgc

SEQ ID NO: 2778 - DNA, 20 bp, synthetic construct
  source 1..20: mol_type = other DNA
caatgcaacttaataacctt

SEQ ID NO: 2779 - DNA, 20 bp, synthetic construct
  source 1..20: mol_type = other DNA
ctagcaagagccataaaaat

SEQ ID NO: 2780 - DNA, 20 bp, synthetic construct
  source 1..20: mol_type = other DNA
atcccttatgtagaagtata

SEQ ID NO: 2781 - DNA, 20 bp, synthetic construct
  source 1..20: mol_type = other DNA
tcaaagcttagagtttttgc

SEQ ID NO: 2782 - DNA, 20 bp, synthetic construct
  source 1..20: mol_type = other DNA
taaaaaggttgaggaccatt

SEQ ID NO: 2783 - DNA, 20 bp, synthetic construct
  source 1..20: mol_type = other DNA
tggtatacttgttgagctct

SEQ ID NO: 2784 - DNA, 20 bp, synthetic construct
  source 1..20: mol_type = other DNA
cattttgaattacaatgcgg

SEQ ID NO: 2785 - DNA, 20 bp, synthetic construct
  source 1..20: mol_type = other DNA
accagagccattccaactcc

SEQ ID NO: 2786 - DNA, 20 bp, synthetic construct
  source 1..20: mol_type = other DNA
gatcagggcccaggcctatg

SEQ ID NO: 2787 - DNA, 20 bp, synthetic construct
  source 1..20: mol_type = other DNA
acgctgtatttttactcacc

SEQ ID NO: 2788 - DNA, 20 bp, synthetic construct
  source 1..20: mol_type = other DNA
tgtatgccctgggagaataa

SEQ ID NO: 2789 - DNA, 20 bp, synthetic construct
  source 1..20: mol_type = other DNA
caaagactttgaaatctcac

SEQ ID NO: 2790 - DNA, 20 bp, synthetic construct
  source 1..20: mol_type = other DNA
atcaccggattgttttcttc

SEQ ID NO: 2791 - DNA, 20 bp, synthetic construct
  source 1..20: mol_type = other DNA
ctgaagtcttgttcagtgtc

SEQ ID NO: 2792 - DNA, 20 bp, synthetic construct
  source 1..20: mol_type = other DNA
ttccatacagatcgcatagc

SEQ ID NO: 2793 - DNA, 20 bp, synthetic construct
  source 1..20: mol_type = other DNA
tgttgttgtttacattatta

SEQ ID NO: 2794 - DNA, 20 bp, synthetic construct
  source 1..20: mol_type = other DNA
caatttcagacttcttgttg

SEQ ID NO: 2795 - DNA, 20 bp, synthetic construct
  source 1..20: mol_type = other DNA
ccctccagctattcacatgg

SEQ ID NO: 2796 - DNA, 20 bp, synthetic construct
  source 1..20: mol_type = other DNA
tctctttgcgcctgtgtcac

SEQ ID NO: 2797 - DNA, 20 bp, synthetic construct
  source 1..20: mol_type = other DNA
tcagtatttactacttctgc

SEQ ID NO: 2798 - DNA, 20 bp, synthetic construct
  source 1..20: mol_type = other DNA
gaagtcttccttcgattatc

SEQ ID NO: 2799 - DNA, 20 bp, synthetic construct
  source 1..20: mol_type = other DNA
attttatgagggactagagc

SEQ ID NO: 2800 - DNA, 20 bp, synthetic construct
  source 1..20: mol_type = other DNA
tcatttctaaataatatgcg

SEQ ID NO: 2801 - DNA, 20 bp, synthetic construct
  source 1..20: mol_type = other DNA
ttggttcagacgcaaccatg

SEQ ID NO: 2802 - DNA, 20 bp, synthetic construct
  source 1..20: mol_type = other DNA
agtatttgaaactgagaagt

SEQ ID NO: 2803 - DNA, 20 bp, synthetic construct
  source 1..20: mol_type = other DNA
ttagctcatcaaggtaccag

SEQ ID NO: 2804 - DNA, 20 bp, synthetic construct
  source 1..20: mol_type = other DNA
gactaaatttttaatataac

SEQ ID NO: 2805 - DNA, 20 bp, synthetic construct
  source 1..20: mol_type = other DNA
agtaagtctctaataaaaaa

SEQ ID NO: 2806 - DNA, 20 bp, synthetic construct
  source 1..20: mol_type = other DNA
gcagcggaaaatatgattta

SEQ ID NO: 2807 - DNA, 20 bp, synthetic construct
  source 1..20: mol_type = other DNA
ttcactaggttctcaaaagg

SEQ ID NO: 2808 - DNA, 20 bp, synthetic construct
  source 1..20: mol_type = other DNA
cactatcaagaccaaaaaga

SEQ ID NO: 2809 - DNA, 20 bp, synthetic construct
  source 1..20: mol_type = other DNA
tgtttaatcacagttttctc

SEQ ID NO: 2810 - DNA, 20 bp, synthetic construct
  source 1..20: mol_type = other DNA
aagatcaaaagaagttttag

SEQ ID NO: 2811 - DNA, 20 bp, synthetic construct
  source 1..20: mol_type = other DNA
aaaagcattctggaagagaa

SEQ ID NO: 2812 - DNA, 20 bp, synthetic construct
  source 1..20: mol_type = other DNA
ttaactgagttctataggtg

SEQ ID NO: 2813 - DNA, 20 bp, synthetic construct
  source 1..20: mol_type = other DNA
tagcaggcgatgttggagga

SEQ ID NO: 2814 - DNA, 20 bp, synthetic construct
  source 1..20: mol_type = other DNA
taggtgtgggtaggtatgag

SEQ ID NO: 2815 - DNA, 20 bp, synthetic construct
  source 1..20: mol_type = other DNA
tatgtgaagataaactgcta

SEQ ID NO: 2816 - DNA, 20 bp, synthetic construct
  source 1..20: mol_type = other DNA
aactcttctctaagtgtcaa

SEQ ID NO: 2817 - DNA, 20 bp, synthetic construct
  source 1..20: mol_type = other DNA
gccagtctcacagtgtcaac

SEQ ID NO: 2818 - DNA, 20 bp, synthetic construct
  source 1..20: mol_type = other DNA
tctctcactggctgttcttt

SEQ ID NO: 2819 - DNA, 20 bp, synthetic construct
  source 1..20: mol_type = other DNA
attttccatataaattatgt

SEQ ID NO: 2820 - DNA, 20 bp, synthetic construct
  source 1..20: mol_type = other DNA
atattaaccacagtgttgca

SEQ ID NO: 2821 - DNA, 20 bp, synthetic construct
  source 1..20: mol_type = other DNA
actaaaatctttcctcagtg

SEQ ID NO: 2822 - DNA, 20 bp, synthetic construct
  source 1..20: mol_type = other DNA
tctaagcgactgcttaataa

SEQ ID NO: 2823 - DNA, 20 bp, synthetic construct
  source 1..20: mol_type = other DNA
tcagtttggaatcttattaa

SEQ ID NO: 2824 - DNA, 20 bp, synthetic construct
  source 1..20: mol_type = other DNA
atgctggttccttacaatta

SEQ ID NO: 2825 - DNA, 20 bp, synthetic construct
  source 1..20: mol_type = other DNA
caaagggttaattaggatct

SEQ ID NO: 2826 - DNA, 20 bp, synthetic construct
  source 1..20: mol_type = other DNA
cttgtacattttaacccttt

SEQ ID NO: 2827 - DNA, 20 bp, synthetic construct
  source 1..20: mol_type = other DNA
tacactttaaacggtttatt

SEQ ID NO: 2828 - DNA, 20 bp, synthetic construct
  source 1..20: mol_type = other DNA
ctttttatgttgctccttct

SEQ ID NO: 2829 - DNA, 20 bp, synthetic construct
  source 1..20: mol_type = other DNA
gccctcttacttactagcca

SEQ ID NO: 2830 - DNA, 20 bp, synthetic construct
  source 1..20: mol_type = other DNA
attgccaaggacttcggagt

SEQ ID NO: 2831 - DNA, 20 bp, synthetic construct
  source 1..20: mol_type = other DNA
caaataggcccaatacatat

SEQ ID NO: 2832 - DNA, 20 bp, synthetic construct
  source 1..20: mol_type = other DNA
aattgtccatcccagtgatt

SEQ ID NO: 2833 - DNA, 20 bp, synthetic construct
  source 1..20: mol_type = other DNA
gttgcccctctgcttcaaaa

SEQ ID NO: 2834 - DNA, 20 bp, synthetic construct
  source 1..20: mol_type = other DNA
aaagttcccattgcattgtt

SEQ ID NO: 2835 - DNA, 20 bp, synthetic construct
  source 1..20: mol_type = other DNA
gacctgttgaaattaaaaag

SEQ ID NO: 2836 - DNA, 20 bp, synthetic construct
  source 1..20: mol_type = other DNA
gaattacattattatctatc

SEQ ID NO: 2837 - DNA, 20 bp, synthetic construct
  source 1..20: mol_type = other DNA
cttattaccttcctgtatat

SEQ ID NO: 2838 - DNA, 20 bp, synthetic construct
  source 1..20: mol_type = other DNA
tctgcatgtaagggcctcgc

SEQ ID NO: 2839 - DNA, 20 bp, synthetic construct
  source 1..20: mol_type = other DNA
ttgcttattattctcacata

SEQ ID NO: 2840 - DNA, 20 bp, synthetic construct
  source 1..20: mol_type = other DNA
tagttacatgtaaccataat

SEQ ID NO: 2841 - DNA, 20 bp, synthetic construct
  source 1..20: mol_type = other DNA
ataaaagccagcatgataaa

SEQ ID NO: 2842 - DNA, 20 bp, synthetic construct
  source 1..20: mol_type = other DNA
ctatgttttcaatgcctttg

SEQ ID NO: 2843 - DNA, 20 bp, synthetic construct
  source 1..20: mol_type = other DNA
aaaatattaggcatttccca

SEQ ID NO: 2844 - DNA, 20 bp, synthetic construct
  source 1..20: mol_type = other DNA
atttgtaactaggttttgtc

SEQ ID NO: 2845 - DNA, 20 bp, synthetic construct
  source 1..20: mol_type = other DNA
aattttatttgtaatactga

SEQ ID NO: 2846 - DNA, 20 bp, synthetic construct
  source 1..20: mol_type = other DNA
ttcaaaggacaacatgatgg

SEQ ID NO: 2847 - DNA, 20 bp, synthetic construct
  source 1..20: mol_type = other DNA
cttcagtgcagctccttctc

SEQ ID NO: 2848 - DNA, 20 bp, synthetic construct
  source 1..20: mol_type = other DNA
aaacagattacattaataag

SEQ ID NO: 2849 - DNA, 20 bp, synthetic construct
  source 1..20: mol_type = other DNA
gaactgctgtgtatttttct

SEQ ID NO: 2850 - DNA, 20 bp, synthetic construct
  source 1..20: mol_type = other DNA
gtcattagcatcattggcgc

SEQ ID NO: 2851 - DNA, 20 bp, synthetic construct
  source 1..20: mol_type = other DNA
gctagctgatgtgttcatga

SEQ ID NO: 2852 - DNA, 20 bp, synthetic construct
  source 1..20: mol_type = other DNA
ccttctccctttgaacacta

SEQ ID NO: 2853 - DNA, 20 bp, synthetic construct
  source 1..20: mol_type = other DNA
gctaagtagtgtttgggatg

SEQ ID NO: 2854 - DNA, 20 bp, synthetic construct
  source 1..20: mol_type = other DNA
tcaatgcaacttaataacct

SEQ ID NO: 2855 - DNA, 20 bp, synthetic construct
  source 1..20: mol_type = other DNA
cccacaatatttgacaaact

SEQ ID NO: 2856 - DNA, 20 bp, synthetic construct
  source 1..20: mol_type = other DNA
gctgtagctatttaggacaa

SEQ ID NO: 2857 - DNA, 20 bp, synthetic construct
  source 1..20: mol_type = other DNA
atgttagccagctggtgtac

SEQ ID NO: 2858 - DNA, 20 bp, synthetic construct
  source 1..20: mol_type = other DNA
aaaccggtccctagtgttaa

SEQ ID NO: 2859 - DNA, 20 bp, synthetic construct
  source 1..20: mol_type = other DNA
agtaatgcccttagggccta

SEQ ID NO: 2860 - DNA, 20 bp, synthetic construct
  source 1..20: mol_type = other DNA
acattttgaattacaatgcg

SEQ ID NO: 2861 - DNA, 20 bp, synthetic construct
  source 1..20: mol_type = other DNA
cccgtgatctgattcccatg

SEQ ID NO: 2862 - DNA, 20 bp, synthetic construct
  source 1..20: mol_type = other DNA
atgctcaaggaggagcaaga

SEQ ID NO: 2863 - DNA, 20 bp, synthetic construct
  source 1..20: mol_type = other DNA
tacgctgtatttttactcac

SEQ ID NO: 2864 - DNA, 20 bp, synthetic construct
  source 1..20: mol_type = other DNA
attatgtatgccctgggaga

SEQ ID NO: 2865 - DNA, 20 bp, synthetic construct
  source 1..20: mol_type = other DNA
gcaaagactttgaaatctca

SEQ ID NO: 2866 - DNA, 20 bp, synthetic construct
  source 1..20: mol_type = other DNA
aatcaccggattgttttctt

SEQ ID NO: 2867 - DNA, 20 bp, synthetic construct
  source 1..20: mol_type = other DNA
gctgaagtcttgttcagtgt

SEQ ID NO: 2868 - DNA, 20 bp, synthetic construct
  source 1..20: mol_type = other DNA
attccatacagatcgcatag

SEQ ID NO: 2869 - DNA, 20 bp, synthetic construct
  source 1..20: mol_type = other DNA
tcttgttgttgtttacatta

SEQ ID NO: 2870 - DNA, 20 bp, synthetic construct
  source 1..20: mol_type = other DNA
ccaatttcagacttcttgtt

SEQ ID NO: 2871 - DNA, 20 bp, synthetic construct
  source 1..20: mol_type = other DNA
gctcttccctccagctattc

SEQ ID NO: 2872 - DNA, 20 bp, synthetic construct
  source 1..20: mol_type = other DNA
ctctctttgcgcctgtgtca

SEQ ID NO: 2873 - DNA, 20 bp, synthetic construct
  source 1..20: mol_type = other DNA
aatcagtatttactacttct

SEQ ID NO: 2874 - DNA, 20 bp, synthetic construct
  source 1..20: mol_type = other DNA
tacaggtgagatatatagga

SEQ ID NO: 2875 - DNA, 20 bp, synthetic construct
  source 1..20: mol_type = other DNA
cattttatgagggactagag

SEQ ID NO: 2876 - DNA, 20 bp, synthetic construct
  source 1..20: mol_type = other DNA
accaatcactgttataaaga

SEQ ID NO: 2877 - DNA, 20 bp, synthetic construct
  source 1..20: mol_type = other DNA
aaattgtcatactgtattgt

SEQ ID NO: 2878 - DNA, 20 bp, synthetic construct
  source 1..20: mol_type = other DNA
ctgattacacaaaccagtct

SEQ ID NO: 2879 - DNA, 20 bp, synthetic construct
  source 1..20: mol_type = other DNA
tttagctcatcaaggtacca

SEQ ID NO: 2880 - DNA, 20 bp, synthetic construct
  source 1..20: mol_type = other DNA
tggcatatacaaataaataa

SEQ ID NO: 2881 - DNA, 20 bp, synthetic construct
  source 1..20: mol_type = other DNA
ttaaaccaggatccctagaa

SEQ ID NO: 2882 - DNA, 20 bp, synthetic construct
  source 1..20: mol_type = other DNA
cacattctgttacttcacca

SEQ ID NO: 2883 - DNA, 20 bp, synthetic construct
  source 1..20: mol_type = other DNA
tttcactaggttctcaaaag

SEQ ID NO: 2884 - DNA, 20 bp, synthetic construct
  source 1..20: mol_type = other DNA
acacatatctgtgtcttaat

SEQ ID NO: 2885 - DNA, 20 bp, synthetic construct
  source 1..20: mol_type = other DNA
ttgtttaatcacagttttct

SEQ ID NO: 2886 - DNA, 20 bp, synthetic construct
  source 1..20: mol_type = other DNA
ctccctatctcaaatgaatg

SEQ ID NO: 2887 - DNA, 20 bp, synthetic construct
  source 1..20: mol_type = other DNA
tgctgaactcttctgaggct

SEQ ID NO: 2888 - DNA, 20 bp, synthetic construct
  source 1..20: mol_type = other DNA
attaactgagttctataggt

SEQ ID NO: 2889 - DNA, 20 bp, synthetic construct
  source 1..20: mol_type = other DNA
aaaagcattgtaacaacaag

SEQ ID NO: 2890 - DNA, 20 bp, synthetic construct
  source 1..20: mol_type = other DNA
taacctcttcttatcccaaa

SEQ ID NO: 2891 - DNA, 20 bp, synthetic construct
  source 1..20: mol_type = other DNA
gaaacatttattgaacataa

SEQ ID NO: 2892 - DNA, 20 bp, synthetic construct
  source 1..20: mol_type = other DNA
gcttttcatcaggtgataaa

SEQ ID NO: 2893 - DNA, 20 bp, synthetic construct
  source 1..20: mol_type = other DNA
gctccaatatcggcaatgct

SEQ ID NO: 2894 - DNA, 20 bp, synthetic construct
  source 1..20: mol_type = other DNA
tttttgtccttcactttctc

SEQ ID NO: 2895 - DNA, 20 bp, synthetic construct
  source 1..20: mol_type = other DNA
aattttccatataaattatg

SEQ ID NO: 2896 - DNA, 20 bp, synthetic construct
  source 1..20: mol_type = other DNA
cctttcttgaagtaagcata

SEQ ID NO: 2897 - DNA, 20 bp, synthetic construct
  source 1..20: mol_type = other DNA
cagcccccttcaggtttttt

SEQ ID NO: 2898 - DNA, 20 bp, synthetic construct
  source 1..20: mol_type = other DNA
ttctaaataatttatacagt

SEQ ID NO: 2899 - DNA, 20 bp, synthetic construct
  source 1..20: mol_type = other DNA
ctcagtttggaatcttatta

SEQ ID NO: 2900 - DNA, 20 bp, synthetic construct
  source 1..20: mol_type = other DNA
aatgctggttccttacaatt

SEQ ID NO: 2901 - DNA, 20 bp, synthetic construct
  source 1..20: mol_type = other DNA
cccaaagggttaattaggat

SEQ ID NO: 2902 - DNA, 20 bp, synthetic construct
  source 1..20: mol_type = other DNA
tcttgtacattttaaccctt

SEQ ID NO: 2903 - DNA, 20 bp, synthetic construct
  source 1..20: mol_type = other DNA
ttaaaatcaactgagaagac

SEQ ID NO: 2904 - DNA, 20 bp, synthetic construct
  source 1..20: mol_type = other DNA
actttttatgttgctccttc

SEQ ID NO: 2905 - DNA, 20 bp, synthetic construct
  source 1..20: mol_type = other DNA
cttaaacaccagatggtcag

SEQ ID NO: 2906 - DNA, 20 bp, synthetic construct
  source 1..20: mol_type = other DNA
atagctaaagagtcaagtgg

SEQ ID NO: 2907 - DNA, 20 bp, synthetic construct
  source 1..20: mol_type = other DNA
agaggaagtaaaaaagaagg

SEQ ID NO: 2908 - DNA, 20 bp, synthetic construct
  source 1..20: mol_type = other DNA
aactgcccctccaacacccc

SEQ ID NO: 2909 - DNA, 20 bp, synthetic construct
  source 1..20: mol_type = other DNA
agcacagaatactagtttat

SEQ ID NO: 2910 - DNA, 20 bp, synthetic construct
  source 1..20: mol_type = other DNA
aaaagttcccattgcattgt

SEQ ID NO: 2911 - DNA, 20 bp, synthetic construct
  source 1..20: mol_type = other DNA
tgatgaggtgctcctggatc

SEQ ID NO: 2912 - DNA, 20 bp, synthetic construct
  source 1..20: mol_type = other DNA
atcagtttgtatgaccataa

SEQ ID NO: 2913 - DNA, 20 bp, synthetic construct
  source 1..20: mol_type = other DNA
acttattaccttcctgtata

SEQ ID NO: 2914 - DNA, 20 bp, synthetic construct
  source 1..20: mol_type = other DNA
ggcactgcattcattttgag

SEQ ID NO: 2915 - DNA, 20 bp, synthetic construct
  source 1..20: mol_type = other DNA
tttgcttattattctcacat

SEQ ID NO: 2916 - DNA, 20 bp, synthetic construct
  source 1..20: mol_type = other DNA
gtagttacatgtaaccataa

SEQ ID NO: 2917 - DNA, 20 bp, synthetic construct
  source 1..20: mol_type = other DNA
attgttaaaatatatacaag

SEQ ID NO: 2918 - DNA, 20 bp, synthetic construct
  source 1..20: mol_type = other DNA
gcagtcattagtggtcctat

SEQ ID NO: 2919 - DNA, 20 bp, synthetic construct
  source 1..20: mol_type = other DNA
ataaatttcatcttatcaga

SEQ ID NO: 2920 - DNA, 20 bp, synthetic construct
  source 1..20: mol_type = other DNA
aatttgtaactaggttttgt

SEQ ID NO: 2921 - DNA, 20 bp, synthetic construct
  source 1..20: mol_type = other DNA
tatactttaaatcaatacta

SEQ ID NO: 2922 - DNA, 20 bp, synthetic construct
  source 1..20: mol_type = other DNA
cttctgccactcagtttact

SEQ ID NO: 2923 - DNA, 20 bp, synthetic construct
  source 1..20: mol_type = other DNA
ggaaatggaattcattgtgg

SEQ ID NO: 2924 - DNA, 20 bp, synthetic construct
  source 1..20: mol_type = other DNA
attagacactggatccaagg

SEQ ID NO: 2925 - DNA, 20 bp, synthetic construct
  source 1..20: mol_type = other DNA
ctgttcgatgcaggactagc

SEQ ID NO: 2926 - DNA, 20 bp, synthetic construct
  source 1..20: mol_type = other DNA
ttcatgactttcaagggtta

SEQ ID NO: 2927 - DNA, 20 bp, synthetic construct
  source 1..20: mol_type = other DNA
ttcttttgctagctgatgtg

SEQ ID NO: 2928 - DNA, 20 bp, synthetic construct
  source 1..20: mol_type = other DNA
tccttctccctttgaacact

SEQ ID NO: 2929 - DNA, 20 bp, synthetic construct
  source 1..20: mol_type = other DNA
ggctaagtagtgtttgggat

SEQ ID NO: 2930 - DNA, 20 bp, synthetic construct
  source 1..20: mol_type = other DNA
gtcaatgcaacttaataacc

SEQ ID NO: 2931 - DNA, 20 bp, synthetic construct
  source 1..20: mol_type = other DNA
tcctttaaaaattccccaca

SEQ ID NO: 2932 - DNA, 20 bp, synthetic construct
  source 1..20: mol_type = other DNA
aatagggttttgttcatgct

SEQ ID NO: 2933 - DNA, 20 bp, synthetic construct
  source 1..20: mol_type = other DNA
tgatcttgtgtatatattac

SEQ ID NO: 2934 - DNA, 20 bp, synthetic construct
  source 1..20: mol_type = other DNA
gactgtattccataaaacaa

SEQ ID NO: 2935 - DNA, 20 bp, synthetic construct
  source 1..20: mol_type = other DNA
ctataaaacagtaatgccct

SEQ ID NO: 2936 - DNA, 20 bp, synthetic construct
  source 1..20: mol_type = other DNA
tacattttgaattacaatgc

SEQ ID NO: 2937 - DNA, 20 bp, synthetic construct
  source 1..20: mol_type = other DNA
attacgaccattctgctcag

SEQ ID NO: 2938 - DNA, 20 bp, synthetic construct
  source 1..20: mol_type = other DNA
caaacctcttcactcctgcc

SEQ ID NO: 2939 - DNA, 20 bp, synthetic construct
  source 1..20: mol_type = other DNA
ttacgctgtatttttactca

SEQ ID NO: 2940 - DNA, 20 bp, synthetic construct
  source 1..20: mol_type = other DNA
tttcttttccgtttttcata

SEQ ID NO: 2941 - DNA, 20 bp, synthetic construct
  source 1..20: mol_type = other DNA
agcaaagactttgaaatctc

SEQ ID NO: 2942 - DNA, 20 bp, synthetic construct
  source 1..20: mol_type = other DNA
tataaacaaactttttgatt

SEQ ID NO: 2943 - DNA, 20 bp, synthetic construct
  source 1..20: mol_type = other DNA
ggaattattctctcaactat

SEQ ID NO: 2944 - DNA, 20 bp, synthetic construct
  source 1..20: mol_type = other DNA
tattccatacagatcgcata

SEQ ID NO: 2945 - DNA, 20 bp, synthetic construct
  source 1..20: mol_type = other DNA
ttcttgttgttgtttacatt

SEQ ID NO: 2946 - DNA, 20 bp, synthetic construct
  source 1..20: mol_type = other DNA
tccaatttcagacttcttgt

SEQ ID NO: 2947 - DNA, 20 bp, synthetic construct
  source 1..20: mol_type = other DNA
aatatacacaaacaatctaa

SEQ ID NO: 2948 - DNA, 20 bp, synthetic construct
  source 1..20: mol_type = other DNA
gctctctttgcgcctgtgtc

SEQ ID NO: 2949 - DNA, 20 bp, synthetic construct
  source 1..20: mol_type = other DNA
gaatcagtatttactacttc

SEQ ID NO: 2950 - DNA, 20 bp, synthetic construct
  source 1..20: mol_type = other DNA
gtctacaaaataacctgtaa

SEQ ID NO: 2951 - DNA, 20 bp, synthetic construct
  source 1..20: mol_type = other DNA
aatgatgctttcaaaggcac

SEQ ID NO: 2952 - DNA, 20 bp, synthetic construct
  source 1..20: mol_type = other DNA
ttatagccaggcatgtggca

SEQ ID NO: 2953 - DNA, 20 bp, synthetic construct
  source 1..20: mol_type = other DNA
taaattgtcatactgtattg

SEQ ID NO: 2954 - DNA, 20 bp, synthetic construct
  source 1..20: mol_type = other DNA
ctatggtttgtcttaagtac

SEQ ID NO: 2955 - DNA, 20 bp, synthetic construct
  source 1..20: mol_type = other DNA
ctttagctcatcaaggtacc

SEQ ID NO: 2956 - DNA, 20 bp, synthetic construct
  source 1..20: mol_type = other DNA
ataaaaacagcttttggtat

SEQ ID NO: 2957 - DNA, 20 bp, synthetic construct
  source 1..20: mol_type = other DNA
aaggccacagaacagagcca

SEQ ID NO: 2958 - DNA, 20 bp, synthetic construct
  source 1..20: mol_type = other DNA
tggtcatgaataagaatcgc

SEQ ID NO: 2959 - DNA, 20 bp, synthetic construct
  source 1..20: mol_type = other DNA
gtttcactaggttctcaaaa

SEQ ID NO: 2960 - DNA, 20 bp, synthetic construct
  source 1..20: mol_type = other DNA
ccagaatgaacacatatctg

SEQ ID NO: 2961 - DNA, 20 bp, synthetic construct
  source 1..20: mol_type = other DNA
tttgtttaatcacagttttc

SEQ ID NO: 2962 - DNA, 20 bp, synthetic construct
  source 1..20: mol_type = other DNA
aggaggctaaggtgaatcac

SEQ ID NO: 2963 - DNA, 20 bp, synthetic construct
  source 1..20: mol_type = other DNA
aaataggtgagggactggaa

SEQ ID NO: 2964 - DNA, 20 bp, synthetic construct
  source 1..20: mol_type = other DNA
aattaactgagttctatagg

SEQ ID NO: 2965 - DNA, 20 bp, synthetic construct
  source 1..20: mol_type = other DNA
actatgcccagcaagtctgg

SEQ ID NO: 2966 - DNA, 20 bp, synthetic construct
  source 1..20: mol_type = other DNA
cttctataactgtcattgtc

SEQ ID NO: 2967 - DNA, 20 bp, synthetic construct
  source 1..20: mol_type = other DNA
gaaagtttatataatctggc

SEQ ID NO: 2968 - DNA, 20 bp, synthetic construct
  source 1..20: mol_type = other DNA
agatcctgtgttccagacac

SEQ ID NO: 2969 - DNA, 20 bp, synthetic construct
  source 1..20: mol_type = other DNA
ggctccaatatcggcaatgc

SEQ ID NO: 2970 - DNA, 20 bp, synthetic construct
  source 1..20: mol_type = other DNA
tccatcaatcttggtctatc

SEQ ID NO: 2971 - DNA, 20 bp, synthetic construct
  source 1..20: mol_type = other DNA
cataggttagaattttccat

SEQ ID NO: 2972 - DNA, 20 bp, synthetic construct
  source 1..20: mol_type = other DNA
tcatgtcttgtattataagt

SEQ ID NO: 2973 - DNA, 20 bp, synthetic construct
  source 1..20: mol_type = other DNA
atatatttctcagccccctt

SEQ ID NO: 2974 - DNA, 20 bp, synthetic construct
  source 1..20: mol_type = other DNA
gataatattcattgctattt

SEQ ID NO: 2975 - DNA, 20 bp, synthetic construct
  source 1..20: mol_type = other DNA
actcagtttggaatcttatt

SEQ ID NO: 2976 - DNA, 20 bp, synthetic construct
  source 1..20: mol_type = other DNA
aaatgctggttccttacaat

SEQ ID NO: 2977 - DNA, 20 bp, synthetic construct
  source 1..20: mol_type = other DNA
ttaacctccttaagattaag

SEQ ID NO: 2978 - DNA, 20 bp, synthetic construct
  source 1..20: mol_type = other DNA
ttcttgtacattttaaccct

SEQ ID NO: 2979 - DNA, 20 bp, synthetic construct
  source 1..20: mol_type = other DNA
taacggttgcttagggttgg

SEQ ID NO: 2980 - DNA, 20 bp, synthetic construct
  source 1..20: mol_type = other DNA
gactttttatgttgctcctt

SEQ ID NO: 2981 - DNA, 20 bp, synthetic construct
  source 1..20: mol_type = other DNA
aaatgaaggactacagatat

SEQ ID NO: 2982 - DNA, 20 bp, synthetic construct
  source 1..20: mol_type = other DNA
gcatcgcaagctttactgca

SEQ ID NO: 2983 - DNA, 20 bp, synthetic construct
  source 1..20: mol_type = other DNA
ggagcgaagaggaagtaaaa

SEQ ID NO: 2984 - DNA, 20 bp, synthetic construct
  source 1..20: mol_type = other DNA
gtcattaagtaggtgaattc

SEQ ID NO: 2985 - DNA, 20 bp, synthetic construct
  source 1..20: mol_type = other DNA
tgagaaatgtcttttctgta

SEQ ID NO: 2986 - DNA, 20 bp, synthetic construct
  source 1..20: mol_type = other DNA
aaaaagttcccattgcattg

SEQ ID NO: 2987 - DNA, 20 bp, synthetic construct
  source 1..20: mol_type = other DNA
aaactgttggctcaaatgat

SEQ ID NO: 2988 - DNA, 20 bp, synthetic construct
  source 1..20: mol_type = other DNA
aaggtagtcctattagatta

SEQ ID NO: 2989 - DNA, 20 bp, synthetic construct
  source 1..20: mol_type = other DNA
tacttattaccttcctgtat

SEQ ID NO: 2990 - DNA, 20 bp, synthetic construct
  source 1..20: mol_type = other DNA
ctcagcctcaaacaccagtt

SEQ ID NO: 2991 - DNA, 20 bp, synthetic construct
  source 1..20: mol_type = other DNA
ttttgcttattattctcaca

SEQ ID NO: 2992 - DNA, 20 bp, synthetic construct
  source 1..20: mol_type = other DNA
tgtagttacatgtaaccata

SEQ ID NO: 2993 - DNA, 20 bp, synthetic construct
  source 1..20: mol_type = other DNA
gtctcaaaagcatgcataca

SEQ ID NO: 2994 - DNA, 20 bp, synthetic construct
  source 1..20: mol_type = other DNA
gaataaaataattatcctat

SEQ ID NO: 2995 - DNA, 20 bp, synthetic construct
  source 1..20: mol_type = other DNA
aggcataaatttcatcttat

SEQ ID NO: 2996 - DNA, 20 bp, synthetic construct
  source 1..20: mol_type = other DNA
taatttgtaactaggttttg

SEQ ID NO: 2997 - DNA, 20 bp, synthetic construct
  source 1..20: mol_type = other DNA
gctgagtgaatgtacatagg

SEQ ID NO: 2998 - DNA, 20 bp, synthetic construct
  source 1..20: mol_type = other DNA
aaggaccacagtctctctca

SEQ ID NO: 2999 - DNA, 20 bp, synthetic construct
  source 1..20: mol_type = other DNA
aacttcccagagctgtggaa

SEQ ID NO: 3000 - DNA, 20 bp, synthetic construct
  source 1..20: mol_type = other DNA
ggactctcaggaaagggcaa

SEQ ID NO: 3001 - DNA, 20 bp, synthetic construct
  source 1..20: mol_type = other DNA
cttttctcatgtgcggcatc

SEQ ID NO: 3002 - DNA, 20 bp, synthetic construct
  source 1..20: mol_type = other DNA
tgatgtttcattgggtttaa

SEQ ID NO: 3003 - DNA, 20 bp, synthetic construct
  source 1..20: mol_type = other DNA
atgtgttcatgactttcaag

SEQ ID NO: 3004 - DNA, 20 bp, synthetic construct
  source 1..20: mol_type = other DNA
gttacttcttttgctagctg

SEQ ID NO: 3005 - DNA, 20 bp, synthetic construct
  source 1..20: mol_type = other DNA
ctaacttctcccctccagag

SEQ ID NO: 3006 - DNA, 20 bp, synthetic construct
  source 1..20: mol_type = other DNA
gtgtttgggatgcttcagac

SEQ ID NO: 3007 - DNA, 20 bp, synthetic construct
  source 1..20: mol_type = other DNA
acttaataaccttagtttta

SEQ ID NO: 3008 - DNA, 20 bp, synthetic construct
  source 1..20: mol_type = other DNA
gaatgctgcattttttttca

SEQ ID NO: 3009 - DNA, 20 bp, synthetic construct
  source 1..20: mol_type = other DNA
taagttgcaatgcctcaaga

SEQ ID NO: 3010 - DNA, 20 bp, synthetic construct
  source 1..20: mol_type = other DNA
tagagtttttgccttccatt

SEQ ID NO: 3011 - DNA, 20 bp, synthetic construct
  source 1..20: mol_type = other DNA
agcatgatcttgtgtatata

SEQ ID NO: 3012 - DNA, 20 bp, synthetic construct
  source 1..20: mol_type = other DNA
ggcacgaaactgacattttc

SEQ ID NO: 3013 - DNA, 20 bp, synthetic construct
  source 1..20: mol_type = other DNA
aattacaatgcggtatatat

SEQ ID NO: 3014 - DNA, 20 bp, synthetic construct
  source 1..20: mol_type = other DNA
cagtatctcagttttttttt

SEQ ID NO: 3015 - DNA, 20 bp, synthetic construct
  source 1..20: mol_type = other DNA
cgcatcattacgaccattct

SEQ ID NO: 3016 - DNA, 20 bp, synthetic construct
  source 1..20: mol_type = other DNA
aacatagtttctcatcacca

SEQ ID NO: 3017 - DNA, 20 bp, synthetic construct
  source 1..20: mol_type = other DNA
ctggccacgacaagttaatt

SEQ ID NO: 3018 - DNA, 20 bp, synthetic construct
  source 1..20: mol_type = other DNA
atctctttgacctaaaggca

SEQ ID NO: 3019 - DNA, 20 bp, synthetic construct
  source 1..20: mol_type = other DNA
gattgttttcttcattattg

SEQ ID NO: 3020 - DNA, 20 bp, synthetic construct
  source 1..20: mol_type = other DNA
cttgttcagtgtccttctag

SEQ ID NO: 3021 - DNA, 20 bp, synthetic construct
  source 1..20: mol_type = other DNA
gggattaggatgccaaatag

SEQ ID NO: 3022 - DNA, 20 bp, synthetic construct
  source 1..20: mol_type = other DNA
agtaatattccatacagatc

SEQ ID NO: 3023 - DNA, 20 bp, synthetic construct
  source 1..20: mol_type = other DNA
agacttcttgttgttgttta

SEQ ID NO: 3024 - DNA, 20 bp, synthetic construct
  source 1..20: mol_type = other DNA
ttcttccaatttcagacttc

SEQ ID NO: 3025 - DNA, 20 bp, synthetic construct
  source 1..20: mol_type = other DNA
accaggaaattgcttctaat

SEQ ID NO: 3026 - DNA, 20 bp, synthetic construct
  source 1..20: mol_type = other DNA
catgtgctctctttgcgcct

SEQ ID NO: 3027 - DNA, 20 bp, synthetic construct
  source 1..20: mol_type = other DNA
atatggccctagagcctaaa

SEQ ID NO: 3028 - DNA, 20 bp, synthetic construct
  source 1..20: mol_type = other DNA
agggactagagcatccataa

SEQ ID NO: 3029 - DNA, 20 bp, synthetic construct
  source 1..20: mol_type = other DNA
aacaaaggccaagagcatat

SEQ ID NO: 3030 - DNA, 20 bp, synthetic construct
  source 1..20: mol_type = other DNA
atggaattactttattctac

SEQ ID NO: 3031 - DNA, 20 bp, synthetic construct
  source 1..20: mol_type = other DNA
caaaacattaacaatacact

SEQ ID NO: 3032 - DNA, 20 bp, synthetic construct
  source 1..20: mol_type = other DNA
atcaaggtaccagttcttat

SEQ ID NO: 3033 - DNA, 20 bp, synthetic construct
  source 1..20: mol_type = other DNA
accaaatcacactaaaatga

SEQ ID NO: 3034 - DNA, 20 bp, synthetic construct
  source 1..20: mol_type = other DNA
agtagggaaccttttttttt

SEQ ID NO: 3035 - DNA, 20 bp, synthetic construct
  source 1..20: mol_type = other DNA
acaacaaaccaaaccacata

SEQ ID NO: 3036 - DNA, 20 bp, synthetic construct
  source 1..20: mol_type = other DNA
ctagaaaggcagatgttgaa

SEQ ID NO: 3037 - DNA, 20 bp, synthetic construct
  source 1..20: mol_type = other DNA
tacacagtttcactaggttc

SEQ ID NO: 3038 - DNA, 20 bp, synthetic construct
  source 1..20: mol_type = other DNA
tgaagttattgttctgactt

SEQ ID NO: 3039 - DNA, 20 bp, synthetic construct
  source 1..20: mol_type = other DNA
tttctcacatttaccattca

SEQ ID NO: 3040 - DNA, 20 bp, synthetic construct
  source 1..20: mol_type = other DNA
aaaaaactgacctattctat

SEQ ID NO: 3041 - DNA, 20 bp, synthetic construct
  source 1..20: mol_type = other DNA
agttctataggtgcttaagt

SEQ ID NO: 3042 - DNA, 20 bp, synthetic construct
  source 1..20: mol_type = other DNA
gaatactcatctgttctaac

SEQ ID NO: 3043 - DNA, 20 bp, synthetic construct
  source 1..20: mol_type = other DNA
tgaaaagcacacatttaagt

SEQ ID NO: 3044 - DNA, 20 bp, synthetic construct
  source 1..20: mol_type = other DNA
gtctcagaaagttcaggtag

SEQ ID NO: 3045 - DNA, 20 bp, synthetic construct
  source 1..20: mol_type = other DNA
tctacttgcattctctacct

SEQ ID NO: 3046 - DNA, 20 bp, synthetic construct
  source 1..20: mol_type = other DNA
tattcaccccatctccttcc

SEQ ID NO: 3047 - DNA, 20 bp, synthetic construct
  source 1..20: mol_type = other DNA
ttcatggctccaatatcggc

SEQ ID NO: 3048 - DNA, 20 bp, synthetic construct
  source 1..20: mol_type = other DNA
ttattttccctgaaaatgag

SEQ ID NO: 3049 - DNA, 20 bp, synthetic construct
  source 1..20: mol_type = other DNA
tgcacataggttagaatttt

SEQ ID NO: 3050 - DNA, 20 bp, synthetic construct
  source 1..20: mol_type = other DNA
tattgctattactatttcca

SEQ ID NO: 3051 - DNA, 20 bp, synthetic construct
  source 1..20: mol_type = other DNA
tatcatatatttctcagccc

SEQ ID NO: 3052 - DNA, 20 bp, synthetic construct
  source 1..20: mol_type = other DNA
ggaatcttattaagcaagtc

SEQ ID NO: 3053 - DNA, 20 bp, synthetic construct
  source 1..20: mol_type = other DNA
tccttacaattatctatgat

SEQ ID NO: 3054 - DNA, 20 bp, synthetic construct
  source 1..20: mol_type = other DNA
taattaggatctatacacac

SEQ ID NO: 3055 - DNA, 20 bp, synthetic construct
  source 1..20: mol_type = other DNA
attttaaccctttgaggaca

SEQ ID NO: 3056 - DNA, 20 bp, synthetic construct
  source 1..20: mol_type = other DNA
taaaactcaaattcatcagt

SEQ ID NO: 3057 - DNA, 20 bp, synthetic construct
  source 1..20: mol_type = other DNA
ggacttgtacacacaatata

SEQ ID NO: 3058 - DNA, 20 bp, synthetic construct
  source 1..20: mol_type = other DNA
gataagactttttatgttgc

SEQ ID NO: 3059 - DNA, 20 bp, synthetic construct
  source 1..20: mol_type = other DNA
taaacactttataggcaata

SEQ ID NO: 3060 - DNA, 20 bp, synthetic construct
  source 1..20: mol_type = other DNA
ttaaactcccagggacatta

SEQ ID NO: 3061 - DNA, 20 bp, synthetic construct
  source 1..20: mol_type = other DNA
attcccaagtgataagagat

SEQ ID NO: 3062 - DNA, 20 bp, synthetic construct
  source 1..20: mol_type = other DNA
ctatagaaaaagcaacctat

SEQ ID NO: 3063 - DNA, 20 bp, synthetic construct
  source 1..20: mol_type = other DNA
ctacacctgctggtgataca

SEQ ID NO: 3064 - DNA, 20 bp, synthetic construct
  source 1..20: mol_type = other DNA
aatctaaggccacatgaaaa

SEQ ID NO: 3065 - DNA, 20 bp, synthetic construct
  source 1..20: mol_type = other DNA
agtaacagcaataaagagag

SEQ ID NO: 3066 - DNA, 20 bp, synthetic construct
  source 1..20: mol_type = other DNA
actatcagtttacaaagatt

SEQ ID NO: 3067 - DNA, 20 bp, synthetic construct
  source 1..20: mol_type = other DNA
tttgttacttattaccttcc

SEQ ID NO: 3068 - DNA, 20 bp, synthetic construct
  source 1..20: mol_type = other DNA
tccacaaagatgctttgcca

SEQ ID NO: 3069 - DNA, 20 bp, synthetic construct
  source 1..20: mol_type = other DNA
taagttgatctacacaaatt

SEQ ID NO: 3070 - DNA, 20 bp, synthetic construct
  source 1..20: mol_type = other DNA
gcccatgtagttacatgtaa

SEQ ID NO: 3071 - DNA, 20 bp, synthetic construct
  source 1..20: mol_type = other DNA
gtagttcagatttggctgag

SEQ ID NO: 3072 - DNA, 20 bp, synthetic construct
  source 1..20: mol_type = other DNA
aaaaacattactaatggaaa

SEQ ID NO: 3073 - DNA, 20 bp, synthetic construct
  source 1..20: mol_type = other DNA
tagtactccttcctatttaa

SEQ ID NO: 3074 - DNA, 20 bp, synthetic construct
  source 1..20: mol_type = other DNA
gtgtttaatttgtaactagg

SEQ ID NO: 3075 - DNA, 20 bp, synthetic construct
  source 1..20: mol_type = other DNA
atacactgggaaaattttcc

SEQ ID NO: 3076 - DNA, 20 bp, synthetic construct
  source 1..20: mol_type = other DNA
ctagctgggagagcctctag

SEQ ID NO: 3077 - DNA, 20 bp, synthetic construct
  source 1..20: mol_type = other DNA
agcctctggtagacacctac

SEQ ID NO: 3078 - DNA, 20 bp, synthetic construct
  source 1..20: mol_type = other DNA
ttctgctaactggtttgccc

SEQ ID NO: 3079 - DNA, 20 bp, synthetic construct
  source 1..20: mol_type = other DNA
ttgttgtatggtaatttggg

SEQ ID NO: 3080 - DNA, 20 bp, synthetic construct
  source 1..20: mol_type = other DNA
tgatgtgttcatgactttca

SEQ ID NO: 3081 - DNA, 20 bp, synthetic construct
  source 1..20: mol_type = other DNA
ttgttacttcttttgctagc

SEQ ID NO: 3082 - DNA, 20 bp, synthetic construct
  source 1..20: mol_type = other DNA
atctccagggtccagcctgg

SEQ ID NO: 3083 - DNA, 20 bp, synthetic construct
  source 1..20: mol_type = other DNA
tagtgtttgggatgcttcag

SEQ ID NO: 3084 - DNA, 20 bp, synthetic construct
  source 1..20: mol_type = other DNA
caacttaataaccttagttt

SEQ ID NO: 3085 - DNA, 20 bp, synthetic construct
  source 1..20: mol_type = other DNA
aataaatcacttctgaaagt

SEQ ID NO: 3086 - DNA, 20 bp, synthetic construct
  source 1..20: mol_type = other DNA
gtaaactccaaaaggacaat

SEQ ID NO: 3087 - DNA, 20 bp, synthetic construct
  source 1..20: mol_type = other DNA
cttagagtttttgccttcca

SEQ ID NO: 3088 - DNA, 20 bp, synthetic construct
  source 1..20: mol_type = other DNA
cacagcatgatcttgtgtat

SEQ ID NO: 3089 - DNA, 20 bp, synthetic construct
  source 1..20: mol_type = other DNA
agttctgatacagttaataa

SEQ ID NO: 3090 - DNA, 20 bp, synthetic construct
  source 1..20: mol_type = other DNA
tgaattacaatgcggtatat

SEQ ID NO: 3091 - DNA, 20 bp, synthetic construct
  source 1..20: mol_type = other DNA
gccagtatctcagttttttt

SEQ ID NO: 3092 - DNA, 20 bp, synthetic construct
  source 1..20: mol_type = other DNA
tgcgcatcattacgaccatt

SEQ ID NO: 3093 - DNA, 20 bp, synthetic construct
  source 1..20: mol_type = other DNA
gtatttttactcaccttttc

SEQ ID NO: 3094 - DNA, 20 bp, synthetic construct
  source 1..20: mol_type = other DNA
aaaccaaaccaatagtctgg

SEQ ID NO: 3095 - DNA, 20 bp, synthetic construct
  source 1..20: mol_type = other DNA
actttgaaatctcacaaggt

SEQ ID NO: 3096 - DNA, 20 bp, synthetic construct
  source 1..20: mol_type = other DNA
cggattgttttcttcattat

SEQ ID NO: 3097 - DNA, 20 bp, synthetic construct
  source 1..20: mol_type = other DNA
gtcttgttcagtgtccttct

SEQ ID NO: 3098 - DNA, 20 bp, synthetic construct
  source 1..20: mol_type = other DNA
aatcctcttccatccccttt

SEQ ID NO: 3099 - DNA, 20 bp, synthetic construct
  source 1..20: mol_type = other DNA
taagtaatattccatacaga

SEQ ID NO: 3100 - DNA, 20 bp, synthetic construct
  source 1..20: mol_type = other DNA
ttcagacttcttgttgttgt

SEQ ID NO: 3101 - DNA, 20 bp, synthetic construct
  source 1..20: mol_type = other DNA
tgttcttccaatttcagact

SEQ ID NO: 3102 - DNA, 20 bp, synthetic construct
  source 1..20: mol_type = other DNA
gttatgactactccacgaac

SEQ ID NO: 3103 - DNA, 20 bp, synthetic construct
  source 1..20: mol_type = other DNA
tatttactacttctgcatgg

SEQ ID NO: 3104 - DNA, 20 bp, synthetic construct
  source 1..20: mol_type = other DNA
acttggtcaggaactcttgg

SEQ ID NO: 3105 - DNA, 20 bp, synthetic construct
  source 1..20: mol_type = other DNA
tgagggactagagcatccat

SEQ ID NO: 3106 - DNA, 20 bp, synthetic construct
  source 1..20: mol_type = other DNA
catatcgaagcagtattctc

SEQ ID NO: 3107 - DNA, 20 bp, synthetic construct
  source 1..20: mol_type = other DNA
attagactggataaaaggag

SEQ ID NO: 3108 - DNA, 20 bp, synthetic construct
  source 1..20: mol_type = other DNA
actttttatacctcatcagg

SEQ ID NO: 3109 - DNA, 20 bp, synthetic construct
  source 1..20: mol_type = other DNA
tcatcaaggtaccagttctt

SEQ ID NO: 3110 - DNA, 20 bp, synthetic construct
  source 1..20: mol_type = other DNA
atcagtagcattcttgacca

SEQ ID NO: 3111 - DNA, 20 bp, synthetic construct
  source 1..20: mol_type = other DNA
gtattttcttgcctttctat

SEQ ID NO: 3112 - DNA, 20 bp, synthetic construct
  source 1..20: mol_type = other DNA
gtttctcagtaaatcaaact

SEQ ID NO: 3113 - DNA, 20 bp, synthetic construct
  source 1..20: mol_type = other DNA
atacagaagaggaaattctg

SEQ ID NO: 3114 - DNA, 20 bp, synthetic construct
  source 1..20: mol_type = other DNA
ggtacacagtttcactaggt

SEQ ID NO: 3115 - DNA, 20 bp, synthetic construct
  source 1..20: mol_type = other DNA
tctccttcagctgtgtcttc

SEQ ID NO: 3116 - DNA, 20 bp, synthetic construct
  source 1..20: mol_type = other DNA
cagtcttactgaaaatgtcc

SEQ ID NO: 3117 - DNA, 20 bp, synthetic construct
  source 1..20: mol_type = other DNA
atatatatgttgaacacctg

SEQ ID NO: 3118 - DNA, 20 bp, synthetic construct
  source 1..20: mol_type = other DNA
tgagttctataggtgcttaa

SEQ ID NO: 3119 - DNA, 20 bp, synthetic construct
  source 1..20: mol_type = other DNA
taacatcacaaaccctcaaa

SEQ ID NO: 3120 - DNA, 20 bp, synthetic construct
  source 1..20: mol_type = other DNA
tttgatactaacctgaatca

SEQ ID NO: 3121 - DNA, 20 bp, synthetic construct
  source 1..20: mol_type = other DNA
agatataccttcggagtact

SEQ ID NO: 3122 - DNA, 20 bp, synthetic construct
  source 1..20: mol_type = other DNA
agataactattttaacaagc

SEQ ID NO: 3123 - DNA, 20 bp, synthetic construct
  source 1..20: mol_type = other DNA
gcactaactgttctctgtgt

SEQ ID NO: 3124 - DNA, 20 bp, synthetic construct
  source 1..20: mol_type = other DNA
ttttcatggctccaatatcg

SEQ ID NO: 3125 - DNA, 20 bp, synthetic construct
  source 1..20: mol_type = other DNA
aaactattttatcaatgata

SEQ ID NO: 3126 - DNA, 20 bp, synthetic construct
  source 1..20: mol_type = other DNA
tgttgcacataggttagaat

SEQ ID NO: 3127 - DNA, 20 bp, synthetic construct
  source 1..20: mol_type = other DNA
tagctaaaattgaatgtcca

SEQ ID NO: 3128 - DNA, 20 bp, synthetic construct
  source 1..20: mol_type = other DNA
taagtatcatatatttctca

SEQ ID NO: 3129 - DNA, 20 bp, synthetic construct
  source 1..20: mol_type = other DNA
ttggaatcttattaagcaag

SEQ ID NO: 3130 - DNA, 20 bp, synthetic construct
  source 1..20: mol_type = other DNA
gttccttacaattatctatg

SEQ ID NO: 3131 - DNA, 20 bp, synthetic construct
  source 1..20: mol_type = other DNA
gttaattaggatctatacac

SEQ ID NO: 3132 - DNA, 20 bp, synthetic construct
  source 1..20: mol_type = other DNA
acattttaaccctttgagga

SEQ ID NO: 3133 - DNA, 20 bp, synthetic construct
  source 1..20: mol_type = other DNA
taggcaaagaccactttaaa

SEQ ID NO: 3134 - DNA, 20 bp, synthetic construct
  source 1..20: mol_type = other DNA
atgtaattcttaaaaaaacc

SEQ ID NO: 3135 - DNA, 20 bp, synthetic construct
  source 1..20: mol_type = other DNA
gagataagactttttatgtt

SEQ ID NO: 3136 - DNA, 20 bp, synthetic construct
  source 1..20: mol_type = other DNA
gttctaaactatttatagac

SEQ ID NO: 3137 - DNA, 20 bp, synthetic construct
  source 1..20: mol_type = other DNA
tgaagaacattatgcaaaaa

SEQ ID NO: 3138 - DNA, 20 bp, synthetic construct
  source 1..20: mol_type = other DNA
actgactaaagcacccttgg

SEQ ID NO: 3139 - DNA, 20 bp, synthetic construct
  source 1..20: mol_type = other DNA
actacaagcaaacacaggca

SEQ ID NO: 3140 - DNA, 20 bp, synthetic construct
  source 1..20: mol_type = other DNA
tcccattgcattgttttaag

SEQ ID NO: 3141 - DNA, 20 bp, synthetic construct
  source 1..20: mol_type = other DNA
aatgacacttcataaccact

SEQ ID NO: 3142 - DNA, 20 bp, synthetic construct
  source 1..20: mol_type = other DNA
ggtgaaacttaagacttaaa

SEQ ID NO: 3143 - DNA, 20 bp, synthetic construct
  source 1..20: mol_type = other DNA
tacaacccctaaggaaataa

SEQ ID NO: 3144 - DNA, 20 bp, synthetic construct
  source 1..20: mol_type = other DNA
actttgttacttattacctt

SEQ ID NO: 3145 - DNA, 20 bp, synthetic construct
  source 1..20: mol_type = other DNA
tattattctcacatataaat

SEQ ID NO: 3146 - DNA, 20 bp, synthetic construct
  source 1..20: mol_type = other DNA
actacggtagttctcagaaa

SEQ ID NO: 3147 - DNA, 20 bp, synthetic construct
  source 1..20: mol_type = other DNA
tataaattcttaaataactc

SEQ ID NO: 3148 - DNA, 20 bp, synthetic construct
  source 1..20: mol_type = other DNA
ccagctcctagtgtcctttt

SEQ ID NO: 3149 - DNA, 20 bp, synthetic construct
  source 1..20: mol_type = other DNA
ggttgacatattagtaattt

SEQ ID NO: 3150 - DNA, 20 bp, synthetic construct
  source 1..20: mol_type = other DNA
caccccaaaataactcaaaa

SEQ ID NO: 3151 - DNA, 20 bp, synthetic construct
  source 1..20: mol_type = other DNA
gtgtgtttaatttgtaacta

SEQ ID NO: 3152 - DNA, 20 bp, synthetic construct
  source 1..20: mol_type = other DNA
gcaaacacagacatatgcag

SEQ ID NO: 3153 - DNA, 20 bp, synthetic construct
  source 1..20: mol_type = other DNA
ttccaaggtaagtgtgtagg

SEQ ID NO: 3154 - DNA, 20 bp, synthetic construct
  source 1..20: mol_type = other DNA
aacagagtgaggttttaggg

SEQ ID NO: 3155 - DNA, 20 bp, synthetic construct
  source 1..20: mol_type = other DNA
ctgtgtatttttcttcctca

SEQ ID NO: 3156 - DNA, 20 bp, synthetic construct
  source 1..20: mol_type = other DNA
gtctccttgttgtatggtaa

SEQ ID NO: 3157 - DNA, 20 bp, synthetic construct
  source 1..20: mol_type = other DNA
ctgatgtgttcatgactttc

SEQ ID NO: 3158 - DNA, 20 bp, synthetic construct
  source 1..20: mol_type = other DNA
cttgttacttcttttgctag

SEQ ID NO: 3159 - DNA, 20 bp, synthetic construct
  source 1..20: mol_type = other DNA
gcccgccccctgccaccagc

SEQ ID NO: 3160 - DNA, 20 bp, synthetic construct
  source 1..20: mol_type = other DNA
gtagtgtttgggatgcttca

SEQ ID NO: 3161 - DNA, 20 bp, synthetic construct
  source 1..20: mol_type = other DNA
gcaacttaataaccttagtt

SEQ ID NO: 3162 - DNA, 20 bp, synthetic construct
  source 1..20: mol_type = other DNA
ctacaaaataacatacacaa

SEQ ID NO: 3163 - DNA, 20 bp, synthetic construct
  source 1..20: mol_type = other DNA
cctagtcacattagaatgta

SEQ ID NO: 3164 - DNA, 20 bp, synthetic construct
  source 1..20: mol_type = other DNA
agcttagagtttttgccttc

SEQ ID NO: 3165 - DNA, 20 bp, synthetic construct
  source 1..20: mol_type = other DNA
acacagcatgatcttgtgta

SEQ ID NO: 3166 - DNA, 20 bp, synthetic construct
  source 1..20: mol_type = other DNA
cacaaagtccacagcaaatg

SEQ ID NO: 3167 - DNA, 20 bp, synthetic construct
  source 1..20: mol_type = other DNA
ttgaattacaatgcggtata

SEQ ID NO: 3168 - DNA, 20 bp, synthetic construct
  source 1..20: mol_type = other DNA
ggccagtatctcagtttttt

SEQ ID NO: 3169 - DNA, 20 bp, synthetic construct
  source 1..20: mol_type = other DNA
gtgcgcatcattacgaccat

SEQ ID NO: 3170 - DNA, 20 bp, synthetic construct
  source 1..20: mol_type = other DNA
tgtatttttactcacctttt

SEQ ID NO: 3171 - DNA, 20 bp, synthetic construct
  source 1..20: mol_type = other DNA
ctagtctatactaccacata

SEQ ID NO: 3172 - DNA, 20 bp, synthetic construct
  source 1..20: mol_type = other DNA
gactttgaaatctcacaagg

SEQ ID NO: 3173 - DNA, 20 bp, synthetic construct
  source 1..20: mol_type = other DNA
accggattgttttcttcatt

SEQ ID NO: 3174 - DNA, 20 bp, synthetic construct
  source 1..20: mol_type = other DNA
aagtcttgttcagtgtcctt

SEQ ID NO: 3175 - DNA, 20 bp, synthetic construct
  source 1..20: mol_type = other DNA
tcctcctctcttcatggcct

SEQ ID NO: 3176 - DNA, 20 bp, synthetic construct
  source 1..20: mol_type = other DNA
gaaatgaagatgaaaatagt

SEQ ID NO: 3177 - DNA, 20 bp, synthetic construct
  source 1..20: mol_type = other DNA
tttcagacttcttgttgttg

SEQ ID NO: 3178 - DNA, 20 bp, synthetic construct
  source 1..20: mol_type = other DNA
tttgttcttccaatttcaga

SEQ ID NO: 3179 - DNA, 20 bp, synthetic construct
  source 1..20: mol_type = other DNA
agaaaagattgtattttaca

SEQ ID NO: 3180 - DNA, 20 bp, synthetic construct
  source 1..20: mol_type = other DNA
gtatttactacttctgcatg

SEQ ID NO: 3181 - DNA, 20 bp, synthetic construct
  source 1..20: mol_type = other DNA
ggtcggcaagcagtgtcttt

SEQ ID NO: 3182 - DNA, 20 bp, synthetic construct
  source 1..20: mol_type = other DNA
ttatgagggactagagcatc

SEQ ID NO: 3183 - DNA, 20 bp, synthetic construct
  source 1..20: mol_type = other DNA
gtgtacttatagtctgtaca

SEQ ID NO: 3184 - DNA, 20 bp, synthetic construct
  source 1..20: mol_type = other DNA
gtacttttacaatgaattat

SEQ ID NO: 3185 - DNA, 20 bp, synthetic construct
  source 1..20: mol_type = other DNA
aaattaccttcggactgtaa

SEQ ID NO: 3186 - DNA, 20 bp, synthetic construct
  source 1..20: mol_type = other DNA
ctcatcaaggtaccagttct

SEQ ID NO: 3187 - DNA, 20 bp, synthetic construct
  source 1..20: mol_type = other DNA
ggacaagaaattttcagttg

SEQ ID NO: 3188 - DNA, 20 bp, synthetic construct
  source 1..20: mol_type = other DNA
acctgatgtcctaaacacat

SEQ ID NO: 3189 - DNA, 20 bp, synthetic construct
  source 1..20: mol_type = other DNA
agatacacgaatacagagcc

SEQ ID NO: 3190 - DNA, 20 bp, synthetic construct
  source 1..20: mol_type = other DNA
agagctcaaactgtaacagg

SEQ ID NO: 3191 - DNA, 20 bp, synthetic construct
  source 1..20: mol_type = other DNA
atgcagtacaacattccatt

SEQ ID NO: 3192 - DNA, 20 bp, synthetic construct
  source 1..20: mol_type = other DNA
aatctacttttatgtctcct

SEQ ID NO: 3193 - DNA, 20 bp, synthetic construct
  source 1..20: mol_type = other DNA
aaaccatccaagacaagaga

SEQ ID NO: 3194 - DNA, 20 bp, synthetic construct
  source 1..20: mol_type = other DNA
tctagtgagtataaaaatat

SEQ ID NO: 3195 - DNA, 20 bp, synthetic construct
  source 1..20: mol_type = other DNA
ctgagttctataggtgctta

SEQ ID NO: 3196 - DNA, 20 bp, synthetic construct
  source 1..20: mol_type = other DNA
ttaacatcagatttaacatc

SEQ ID NO: 3197 - DNA, 20 bp, synthetic construct
  source 1..20: mol_type = other DNA
actagaaatctgaccttatt

SEQ ID NO: 3198 - DNA, 20 bp, synthetic construct
  source 1..20: mol_type = other DNA
tatcaatccatcaaaaatat

SEQ ID NO: 3199 - DNA, 20 bp, synthetic construct
  source 1..20: mol_type = other DNA
tctgtatgttcctagtactt

SEQ ID NO: 3200 - DNA, 20 bp, synthetic construct
  source 1..20: mol_type = other DNA
gttaccaaattctcacagtt

SEQ ID NO: 3201 - DNA, 20 bp, synthetic construct
  source 1..20: mol_type = other DNA
tttttcatggctccaatatc

SEQ ID NO: 3202 - DNA, 20 bp, synthetic construct
  source 1..20: mol_type = other DNA
aagtattttaagtatttaga

SEQ ID NO: 3203 - DNA, 20 bp, synthetic construct
  source 1..20: mol_type = other DNA
gtgttgcacataggttagaa

SEQ ID NO: 3204 - DNA, 20 bp, synthetic construct
  source 1..20: mol_type = other DNA
tggagaaaagactcaatgaa

SEQ ID NO: 3205 - DNA, 20 bp, synthetic construct
  source 1..20: mol_type = other DNA
ttaagtatcatatatttctc

SEQ ID NO: 3206 - DNA, 20 bp, synthetic construct
  source 1..20: mol_type = other DNA
tttggaatcttattaagcaa

SEQ ID NO: 3207 - DNA, 20 bp, synthetic construct
  source 1..20: mol_type = other DNA
ggttccttacaattatctat

SEQ ID NO: 3208 - DNA, 20 bp, synthetic construct
  source 1..20: mol_type = other DNA
ggttaattaggatctataca

SEQ ID NO: 3209 - DNA, 20 bp, synthetic construct
  source 1..20: mol_type = other DNA
tacattttaaccctttgagg

SEQ ID NO: 3210 - DNA, 20 bp, synthetic construct
  source 1..20: mol_type = other DNA
taaaggataggcaaagacca

SEQ ID NO: 3211 - DNA, 20 bp, synthetic construct
  source 1..20: mol_type = other DNA
aggtttacagaaagttgtgc

SEQ ID NO: 3212 - DNA, 20 bp, synthetic construct
  source 1..20: mol_type = other DNA
tcctggtatgcccctatgga

SEQ ID NO: 3213 - DNA, 20 bp, synthetic construct
  source 1..20: mol_type = other DNA
ttactatgggttggacactt

SEQ ID NO: 3214 - DNA, 20 bp, synthetic construct
  source 1..20: mol_type = other DNA
ccagtgtctctgaagaacat

SEQ ID NO: 3215 - DNA, 20 bp, synthetic construct
  source 1..20: mol_type = other DNA
cccttgtgccttgaataaaa

SEQ ID NO: 3216 - DNA, 20 bp, synthetic construct
  source 1..20: mol_type = other DNA
tataatcacaactgatgggc

SEQ ID NO: 3217 - DNA, 20 bp, synthetic construct
  source 1..20: mol_type = other DNA
ttcccattgcattgttttaa

SEQ ID NO: 3218 - DNA, 20 bp, synthetic construct
  source 1..20: mol_type = other DNA
caaacaaaaaggaataagct

SEQ ID NO: 3219 - DNA, 20 bp, synthetic construct
  source 1..20: mol_type = other DNA
aagggctgccagaaacagtg

SEQ ID NO: 3220 - DNA, 20 bp, synthetic construct
  source 1..20: mol_type = other DNA
aaagaatgtcaccattttac

SEQ ID NO: 3221 - DNA, 20 bp, synthetic construct
  source 1..20: mol_type = other DNA
tactttgttacttattacct

SEQ ID NO: 3222 - DNA, 20 bp, synthetic construct
  source 1..20: mol_type = other DNA
ttattattctcacatataaa

SEQ ID NO: 3223 - DNA, 20 bp, synthetic construct
  source 1..20: mol_type = other DNA
tgaataaaccaaaattatcc

SEQ ID NO: 3224 - DNA, 20 bp, synthetic construct
  source 1..20: mol_type = other DNA
gataatgtggaaaattaaga

SEQ ID NO: 3225 - DNA, 20 bp, synthetic construct
  source 1..20: mol_type = other DNA
atagaacaaaacaattcttt

SEQ ID NO: 3226 - DNA, 20 bp, synthetic construct
  source 1..20: mol_type = other DNA
aaaggtaaattagccttttg

SEQ ID NO: 3227 - DNA, 20 bp, synthetic construct
  source 1..20: mol_type = other DNA
ccaaactactaacagagaca

SEQ ID NO: 3228 - DNA, 20 bp, synthetic construct
  source 1..20: mol_type = other DNA
taaccacattccagaactag

SEQ ID NO: 3229 - DNA, 20 bp, synthetic construct
  source 1..20: mol_type = other DNA
tatagttcccagccctctct

SEQ ID NO: 3230 - DNA, 20 bp, synthetic construct
  source 1..20: mol_type = other DNA
ccccggtagtcacttcggag

SEQ ID NO: 3231 - DNA, 20 bp, synthetic construct
  source 1..20: mol_type = other DNA
gggcacatggcaaatttgag

SEQ ID NO: 3232 - DNA, 18 bp, synthetic construct
  source 1..18: mol_type = other DNA
tgtacttttctcatgtgc

SEQ ID NO: 3233 - DNA, 18 bp, synthetic construct
  source 1..18: mol_type = other DNA
ggattctgtacttttctc

SEQ ID NO: 3234 - DNA, 20 bp, synthetic construct
  source 1..20: mol_type = other DNA
ctggattctgtacttttctc

SEQ ID NO: 3235 - DNA, 20 bp, synthetic construct
  source 1..20: mol_type = other DNA
tggattctgtacttttctca

SEQ ID NO: 3236 - DNA, 20 bp, synthetic construct
  source 1..20: mol_type = other DNA
gtacttcacatttggagccc

SEQ ID NO: 3237 - DNA, 20 bp, synthetic construct
  source 1..20: mol_type = other DNA
actggattctgtacttttct

SEQ ID NO: 3238 - DNA, 20 bp, synthetic construct
  source 1..20: mol_type = other DNA
ctccattatttcttcacgtt

SEQ ID NO: 3239 - DNA, 20 bp, synthetic construct
  source 1..20: mol_type = other DNA
tctccattatttcttcacgt

SEQ ID NO: 3240 - DNA, 18 bp, synthetic construct
  source 1..18: mol_type = other DNA
ttagagtttttgccttcc

SEQ ID NO: 3241 - DNA, 18 bp, synthetic construct
  source 1..18: mol_type = other DNA
cttagagtttttgccttc

SEQ ID NO: 3242 - DNA, 18 bp, synthetic construct
  source 1..18: mol_type = other DNA
gcttagagtttttgcctt

SEQ ID NO: 3243 - DNA, 18 bp, synthetic construct
  source 1..18: mol_type = other DNA
tatgtttgtctgtcttat

SEQ ID NO: 3244 - DNA, 18 bp, synthetic construct
  source 1..18: mol_type = other DNA
gtatgtttgtctgtctta

SEQ ID NO: 3245 - DNA, 18 bp, synthetic construct
  source 1..18: mol_type = other DNA
cgtatgtttgtctgtctt

SEQ ID NO: 3246 - DNA, 18 bp, synthetic construct
  source 1..18: mol_type = other DNA
tacttcacatttggagcc

SEQ ID NO: 3247 - DNA, 18 bp, synthetic construct
  source 1..18: mol_type = other DNA
gtacttcacatttggagc

SEQ ID NO: 3248 - DNA, 18 bp, synthetic construct
  source 1..18: mol_type = other DNA
tgtacttcacatttggag

SEQ ID NO: 3249 - DNA, 18 bp, synthetic construct
  source 1..18: mol_type = other DNA
ttttctcatgtgcggcat

SEQ ID NO: 3250 - DNA, 18 bp, synthetic construct
  source 1..18: mol_type = other DNA
cttttctcatgtgcggca

SEQ ID NO: 3251 - DNA, 18 bp, synthetic construct
  source 1..18: mol_type = other DNA
acttttctcatgtgcggc

SEQ ID NO: 3252 - DNA, 18 bp, synthetic construct
  source 1..18: mol_type = other DNA
tacttttctcatgtgcgg

SEQ ID NO: 3253 - DNA, 18 bp, synthetic construct
  source 1..18: mol_type = other DNA
gtacttttctcatgtgcg

SEQ ID NO: 3254 - DNA, 18 bp, synthetic construct
  source 1..18: mol_type = other DNA
ctgtacttttctcatgtg

SEQ ID NO: 3255 - DNA, 18 bp, synthetic construct
  source 1..18: mol_type = other DNA
tctgtacttttctcatgt

SEQ ID NO: 3256 - DNA, 18 bp, synthetic construct
  source 1..18: mol_type = other DNA
ttctgtacttttctcatg

SEQ ID NO: 3257 - DNA, 18 bp, synthetic construct
  source 1..18: mol_type = other DNA
attctgtacttttctcat

SEQ ID NO: 3258 - DNA, 18 bp, synthetic construct
  source 1..18: mol_type = other DNA
gattctgtacttttctca

SEQ ID NO: 3259 - DNA, 18 bp, synthetic construct
  source 1..18: mol_type = other DNA
tggattctgtacttttct

SEQ ID NO: 3260 - DNA, 18 bp, synthetic construct
  source 1..18: mol_type = other DNA
ctggattctgtacttttc

SEQ ID NO: 3261 - DNA, 18 bp, synthetic construct
  source 1..18: mol_type = other DNA
ctccattatttcttcacg

SEQ ID NO: 3262 - DNA, 18 bp, synthetic construct
  source 1..18: mol_type = other DNA
tctccattatttcttcac

SEQ ID NO: 3263 - DNA, 18 bp, synthetic construct
  source 1..18: mol_type = other DNA
ctctccattatttcttca

SEQ ID NO: 3264 - DNA, 18 bp, synthetic construct
  source 1..18: mol_type = other DNA
taactggtttgcccttgc

SEQ ID NO: 3265 - DNA, 18 bp, synthetic construct
  source 1..18: mol_type = other DNA
ctaactggtttgcccttg

SEQ ID NO: 3266 - DNA, 18 bp, synthetic construct
  source 1..18: mol_type = other DNA
gctaactggtttgccctt

SEQ ID NO: 3267 - DNA, 18 bp, synthetic construct
  source 1..18: mol_type = other DNA
tgctaactggtttgccct

SEQ ID NO: 3268 - DNA, 18 bp, synthetic construct
  source 1..18: mol_type = other DNA
ctgctaactggtttgccc

SEQ ID NO: 3269 - DNA, 18 bp, synthetic construct
  source 1..18: mol_type = other DNA
tctgctaactggtttgcc

SEQ ID NO: 3270 - DNA, 18 bp, synthetic construct
  source 1..18: mol_type = other DNA
ttctgctaactggtttgc

SEQ ID NO: 3271 - DNA, 18 bp, synthetic construct
  source 1..18: mol_type = other DNA
tcatcattttccagggcc

SEQ ID NO: 3272 - DNA, 18 bp, synthetic construct
  source 1..18: mol_type = other DNA
atcatcattttccagggc

SEQ ID NO: 3273 - DNA, 18 bp, synthetic construct
  source 1..18: mol_type = other DNA
tatcatcattttccaggg

SEQ ID NO: 3274 - DNA, 18 bp, synthetic construct
  source 1..18: mol_type = other DNA
ctatcatcattttccagg

SEQ ID NO: 3275 - DNA, 18 bp, synthetic construct
  source 1..18: mol_type = other DNA
cctatcatcattttccag

SEQ ID NO: 3276 - DNA, 18 bp, synthetic construct
  source 1..18: mol_type = other DNA
tcctatcatcattttcca

SEQ ID NO: 3277 - DNA, 18 bp, synthetic construct
  source 1..18: mol_type = other DNA
ctcctatcatcattttcc

SEQ ID NO: 3278 - DNA, 18 bp, synthetic construct
  source 1..18: mol_type = other DNA
ctatttctttgtccagga

SEQ ID NO: 3279 - DNA, 18 bp, synthetic construct
  source 1..18: mol_type = other DNA
tctatttctttgtccagg

SEQ ID NO: 3280 - DNA, 18 bp, synthetic construct
  source 1..18: mol_type = other DNA
ctctatttctttgtccag

SEQ ID NO: 3281 - DNA, 18 bp, synthetic construct
  source 1..18: mol_type = other DNA
tctctatttctttgtcca

SEQ ID NO: 3282 - DNA, 18 bp, synthetic construct
  source 1..18: mol_type = other DNA
ttctctatttctttgtcc

SEQ ID NO: 3283 - DNA, 18 bp, synthetic construct
  source 1..18: mol_type = other DNA
cttctctatttctttgtc

SEQ ID NO: 3284 - DNA, 18 bp, synthetic construct
  source 1..18: mol_type = other DNA
acttctctatttctttgt

SEQ ID NO: 3285 - DNA, 18 bp, synthetic construct
  source 1..18: mol_type = other DNA
gtggtgtgcgcatgtaga

SEQ ID NO: 3286 - DNA, 18 bp, synthetic construct
  source 1..18: mol_type = other DNA
ggtggtgtgcgcatgtag

SEQ ID NO: 3287 - DNA, 18 bp, synthetic construct
  source 1..18: mol_type = other DNA
tggtggtgtgcgcatgta

SEQ ID NO: 3288 - DNA, 18 bp, synthetic construct
  source 1..18: mol_type = other DNA
tactgtttcgacctctga

SEQ ID NO: 3289 - DNA, 18 bp, synthetic construct
  source 1..18: mol_type = other DNA
ttactgtttcgacctctg

SEQ ID NO: 3290 - DNA, 18 bp, synthetic construct
  source 1..18: mol_type = other DNA
gttactgtttcgacctct

SEQ ID NO: 3291 - DNA, 20 bp, synthetic construct
  source 1..20: mol_type = other DNA
gttactgtttcgacctctga

SEQ ID NO: 3292 - DNA, 18 bp, synthetic construct
  source 1..18: mol_type = other DNA
tgcctctactcggtccaa

SEQ ID NO: 3293 - DNA, 20 bp, synthetic construct
  source 1..20: mol_type = other DNA
gttactgtttcgacctcgga

SEQ ID NO: 3294 - DNA, 20 bp, synthetic construct
  source 1..20: mol_type = other DNA
gtatgtttgtctgtcttatt

SEQ ID NO: 3295 - DNA, 20 bp, synthetic construct
  source 1..20: mol_type = other DNA
tcgtatgtttgtctgtctta

SEQ ID NO: 3296 - DNA, 20 bp, synthetic construct
  source 1..20: mol_type = other DNA
acttcacatttggagcccta

SEQ ID NO: 3297 - DNA, 20 bp, synthetic construct
  source 1..20: mol_type = other DNA
tacttcacatttggagccct

SEQ ID NO: 3298 - DNA, 20 bp, synthetic construct
  source 1..20: mol_type = other DNA
attctgtacttttctcatgt

SEQ ID NO: 3299 - DNA, 20 bp, synthetic construct
  source 1..20: mol_type = other DNA
aactggattctgtacttttc

SEQ ID NO: 3300 - DNA, 20 bp, synthetic construct
  source 1..20: mol_type = other DNA
gaactggattctgtactttt

SEQ ID NO: 3301 - DNA, 20 bp, synthetic construct
  source 1..20: mol_type = other DNA
tccattatttcttcacgttt

SEQ ID NO: 3302 - DNA, 20 bp, synthetic construct
  source 1..20: mol_type = other DNA
ctctatttctttgtccagga

SEQ ID NO: 3303 - DNA, 20 bp, synthetic construct
  source 1..20: mol_type = other DNA
gtggtgtgcgcatgtagacc

SEQ ID NO: 3304 - DNA, 20 bp, synthetic construct
  source 1..20: mol_type = other DNA
ggtggtgtgcgcatgtagac

SEQ ID NO: 3305 - DNA, 20 bp, synthetic construct
  source 1..20: mol_type = other DNA
gtggtggtgtgcgcatgtag

SEQ ID NO: 3306 - DNA, 20 bp, synthetic construct
  source 1..20: mol_type = other DNA
cgtggtggtgtgcgcatgta

SEQ ID NO: 3307 - DNA, 20 bp, synthetic construct
  source 1..20: mol_type = other DNA
agttcacctgcatcccaggg

SEQ ID NO: 3308 - DNA, 20 bp, synthetic construct
  source 1..20: mol_type = other DNA
gagttcacctgcatcccagg

SEQ ID NO: 3309 - DNA, 20 bp, synthetic construct
  source 1..20: mol_type = other DNA
tgagttcacctgcatcccag

SEQ ID NO: 3310 - DNA, 20 bp, synthetic construct
  source 1..20: mol_type = other DNA
tgtgagttcacctgcatccc

SEQ ID NO: 3311 - DNA, 20 bp, synthetic construct
  source 1..20: mol_type = other DNA
ctgtgagttcacctgcatcc

SEQ ID NO: 3312 - DNA, 20 bp, synthetic construct
  source 1..20: mol_type = other DNA
gctgtgagttcacctgcatc

SEQ ID NO: 3313 - DNA, 20 bp, synthetic construct
  source 1..20: mol_type = other DNA
gcggtgaattctgtctccca

SEQ ID NO: 3314 - DNA, 20 bp, synthetic construct
  source 1..20: mol_type = other DNA
tacgcggtgaattctgtctc

SEQ ID NO: 3315 - DNA, 20 bp, synthetic construct
  source 1..20: mol_type = other DNA
catacgcggtgaattctgtc

SEQ ID NO: 3316 - DNA, 20 bp, synthetic construct
  source 1..20: mol_type = other DNA
actgtttcgacctctgaaaa

SEQ ID NO: 3317 - DNA, 20 bp, synthetic construct
  source 1..20: mol_type = other DNA
tactgtttcgacctctgaaa

SEQ ID NO: 3318 - DNA, 20 bp, synthetic construct
  source 1..20: mol_type = other DNA
ttactgtttcgacctctgaa

SEQ ID NO: 3319 - DNA, 20 bp, synthetic construct
  source 1..20: mol_type = other DNA
tgttactgtttcgacctctg

SEQ ID NO: 3320 - DNA, 20 bp, synthetic construct
  source 1..20: mol_type = other DNA
  modified_base 1: mod_base = OTHER; note = 2'-O-methoxyethyl guanosine 3'-phosphorothioate
  modified_base 2: mod_base = OTHER; note = 2'-O-methoxyethyl thymidine 3'-phosphodiester
  modified_base 3: mod_base = OTHER; note = 2'-O-methoxyethyl adenosine 3'-phosphodiester
  modified_base 4: mod_base = OTHER; note = 2'-O-methoxyethyl 5-methyl cytidine 3'-phosphodiester
  modified_base 5: mod_base = OTHER; note = 2'-O-methoxyethyl thymidine 3'-phosphodiester
  modified_base 6..8: mod_base = OTHER; note = 2'-deoxythymidine 3'-phosphorothioate
  modified_base 9: mod_base = OTHER; note = 5-methyl 2'-deoxycytidine 3'-phosphorothioate
  modified_base 10: mod_base = OTHER; note = 2'-deoxythymidine 3'-phosphorothioate
  modified_base 11: mod_base = OTHER; note = 5-methyl 2'-deoxycytidine 3'-phosphorothioate
  modified_base 12: mod_base = OTHER; note = 2'-deoxyadenosine 3'-phosphorothioate
  modified_base 13: mod_base = OTHER; note = 2'-deoxythymidine 3'-phosphorothioate
  modified_base 14: mod_base = OTHER; note = 2'-deoxyguanosine 3'-phosphorothioate
  modified_base 15: mod_base = OTHER; note = 2'-deoxythymidine 3'-phosphorothioate
  modified_base 16: mod_base = OTHER; note = 2'-O-methoxyethyl guanosine 3'-phosphodiester
  modified_base 17: mod_base = OTHER; note = 2'-O-methoxyethyl 5-methyl cytidine 3'-phosphodiester
  modified_base 18..19: mod_base = OTHER; note = 2'-O-methoxyethyl guanosine 3'-phosphorothioate
  modified_base 20: mod_base = OTHER; note = 2'-O-methoxyethyl 5-methyl cytidine
gtacttttctcatgtgcggc

SEQ ID NO: 3321 - DNA, 20 bp, synthetic construct
  source 1..20: mol_type = other DNA
  modified_base 1: mod_base = OTHER; note = 2'-O-methoxyethyl 5-methyl cytidine 3'-phosphorothioate
  modified_base 2: mod_base = OTHER; note = 2'-O-methoxyethyl thymidine 3'-phosphodiester
  modified_base 3: mod_base = OTHER; note = 2'-O-methoxyethyl guanosine 3'-phosphodiester
  modified_base 4: mod_base = OTHER; note = 2'-O-methoxyethyl 5-methyl cytidine 3'-phosphodiester
  modified_base 5: mod_base = OTHER; note = 2'-deoxythymidine 3'-phosphorothioate
  modified_base 6..7: mod_base = OTHER; note = 2'-deoxyadenosine 3'-phosphorothioate
  modified_base 8: mod_base = OTHER; note = 5-methyl 2'-deoxycytidine 3'-phosphorothioate
  modified_base 9: mod_base = OTHER; note = 2'-deoxythymidine 3'-phosphorothioate
  modified_base 10..11: mod_base = OTHER; note = 2'-deoxyguanosine 3'-phosphorothioate
  modified_base 12..14: mod_base = OTHER; note = 2'-deoxythymidine 3'-phosphorothioate
  modified_base 15: mod_base = OTHER; note = 2'-O-methoxyethyl guanosine 3'-phosphodiester
  modified_base 16..17: mod_base = OTHER; note = 2'-O-methoxyethyl 5-methyl cytidine 3'-phosphodiester
  modified_base 18: mod_base = OTHER; note = 2'-O-methoxyethyl 5-methyl cytidine 3'-phosphorothioate
  modified_base 19: mod_base = OTHER; note = 2'-O-methoxyethyl thymidine 3'-phosphorothioate
  modified_base 20: mod_base = OTHER; note = 2'-O-methoxyethyl thymidine
ctgctaactggtttgccctt

SEQ ID NO: 3322 - DNA, 20 bp, synthetic construct
  source 1..20: mol_type = other DNA
  modified_base 1: mod_base = OTHER; note = 2'-O-methoxyethyl thymidine 3'-phosphorothioate
  modified_base 2: mod_base = OTHER; note = 2'-O-methoxyethyl guanosine 3'-phosphodiester
  modified_base 3: mod_base = OTHER; note = 2'-O-methoxyethyl thymidine 3'-phosphodiester
  modified_base 4: mod_base = OTHER; note = 2'-O-methoxyethyl adenosine 3'-phosphodiester
  modified_base 5: mod_base = OTHER; note = 2'-O-methoxyethyl 5-methyl cytidine 3'-phosphodiester
  modified_base 6: mod_base = OTHER; note = 2'-O-methoxyethyl thymidine 3'-phosphodiester
  modified_base 7: mod_base = OTHER; note = 2'-deoxythymidine 3'-phosphorothioate
  modified_base 8: mod_base = OTHER; note = 5-methyl 2'-deoxycytidine 3'-phosphorothioate
  modified_base 9: mod_base = OTHER; note = 2'-deoxyadenosine 3'-phosphorothioate
  modified_base 10: mod_base = OTHER; note = 5-methyl 2'-deoxycytidine 3'-phosphorothioate
  modified_base 11: mod_base = OTHER; note = 2'-deoxyadenosine 3'-phosphorothioate
  modified_base 12..14: mod_base = OTHER; note = 2'-deoxythymidine 3'-phosphorothioate
  modified_base 15..16: mod_base = OTHER; note = 2'-deoxyguanosine 3'-phosphorothioate
  modified_base 17: mod_base = OTHER; note = 2'-O-methoxyethyl adenosine 3'-phosphodiester
  modified_base 18: mod_base = OTHER; note = 2'-O-methoxyethyl guanosine 3'-phosphorothioate
  modified_base 19: mod_base = OTHER; note = 2'-O-methoxyethyl 5-methyl cytidine 3'-phosphorothioate
  modified_base 20: mod_base = OTHER; note = 2'-O-methoxyethyl 5-methyl cytidine
tgtacttcacatttggagcc

SEQ ID NO: 3323 - DNA, 20 bp, synthetic construct
  source 1..20: mol_type = other DNA
  modified_base 1: mod_base = OTHER; note = 2'-O-methoxyethyl thymidine 3'-phosphorothioate
  modified_base 2..3: mod_base = OTHER; note = 2'-O-methoxyethyl guanosine 3'-phosphodiester
  modified_base 4: mod_base = OTHER; note = 2'-O-methoxyethyl adenosine 3'-phosphodiester
  modified_base 5..6: mod_base = OTHER; note = 2'-O-methoxyethyl thymidine 3'-phosphodiester
  modified_base 7: mod_base = OTHER; note = 5-methyl 2'-deoxycytidine 3'-phosphorothioate
  modified_base 8: mod_base = OTHER; note = 2'-deoxythymidine 3'-phosphorothioate
  modified_base 9: mod_base = OTHER; note = 2'-deoxyguanosine 3'-phosphorothioate
  modified_base 10: mod_base = OTHER; note = 2'-deoxythymidine 3'-phosphorothioate
  modified_base 11: mod_base = OTHER; note = 2'-deoxyadenosine 3'-phosphorothioate
  modified_base 12: mod_base = OTHER; note = 5-methyl 2'-deoxycytidine 3'-phosphorothioate
  modified_base 13..16: mod_base = OTHER; note = 2'-deoxythymidine 3'-phosphorothioate
  modified_base 17: mod_base = OTHER; note = 2'-O-methoxyethyl 5-methyl cytidine 3'-phosphodiester
  modified_base 18: mod_base = OTHER; note = 2'-O-methoxyethyl thymidine 3'-phosphorothioate
  modified_base 19: mod_base = OTHER; note = 2'-O-methoxyethyl 5-methyl cytidine 3'-phosphorothioate
  modified_base 20: mod_base = OTHER; note = 2'-O-methoxyethyl adenosine
tggattctgtacttttctca

SEQ ID NO: 3324 - DNA, 20 bp, synthetic construct
  source 1..20: mol_type = other DNA
  modified_base 1: mod_base = OTHER; note = 2'-O-methoxyethyl 5-methyl cytidine 3'-phosphorothioate
  modified_base 2: mod_base = OTHER; note = 2'-O-methoxyethyl 5-methyl cytidine 3'-phosphodiester
  modified_base 3: mod_base = OTHER; note = 2'-O-methoxyethyl thymidine 3'-phosphodiester
  modified_base 4: mod_base = OTHER; note = 2'-O-methoxyethyl adenosine 3'-phosphodiester
  modified_base 5: mod_base = OTHER; note = 2'-O-methoxyethyl thymidine 3'-phosphodiester
  modified_base 6: mod_base = OTHER; note = 2'-O-methoxyethyl 5-methyl cytidine 3'-phosphodiester
  modified_base 7: mod_base = OTHER; note = 2'-deoxyadenosine 3'-phosphorothioate
  modified_base 8: mod_base = OTHER; note = 2'-deoxythymidine 3'-phosphorothioate
  modified_base 9: mod_base = OTHER; note = 5-methyl 2'-deoxycytidine 3'-phosphorothioate
  modified_base 10: mod_base = OTHER; note = 2'-deoxyadenosine 3'-phosphorothioate
  modified_base 11..14: mod_base = OTHER; note = 2'-deoxythymidine 3'-phosphorothioate
  modified_base 15..16: mod_base = OTHER; note = 5-methyl 2'-deoxycytidine 3'-phosphorothioate
  modified_base 17: mod_base = OTHER; note = 2'-O-methoxyethyl adenosine 3'-phosphodiester
  modified_base 18..19: mod_base = OTHER; note = 2'-O-methoxyethyl guanosine 3'-phosphorothioate
  modified_base 20: mod_base = OTHER; note = 2'-O-methoxyethyl guanosine
cctatcatcattttccaggg

SEQ ID NO: 3325 - DNA, 20 bp, synthetic construct
  source 1..20: mol_type = other DNA
  modified_base 1: mod_base = OTHER; note = 2'-O-methoxyethyl thymidine 3'-phosphorothioate
  modified_base 2: mod_base = OTHER; note = 2'-O-methoxyethyl 5-methyl cytidine 3'-phosphodiester
  modified_base 3: mod_base = OTHER; note = 2'-O-methoxyethyl thymidine 3'-phosphodiester
  modified_base 4: mod_base = OTHER; note = 2'-O-methoxyethyl guanosine 3'-phosphodiester
  modified_base 5: mod_base = OTHER; note = 2'-O-methoxyethyl thymidine 3'-phosphorothioate
  modified_base 6: mod_base = OTHER; note = 2'-deoxyadenosine 3'-phosphorothioate
  modified_base 7: mod_base = OTHER; note = 5-methyl 2'-deoxycytidine 3'-phosphorothioate
  modified_base 8..11: mod_base = OTHER; note = 2'-deoxythymidine 3'-phosphorothioate
  modified_base 12: mod_base = OTHER; note = 5-methyl 2'-deoxycytidine 3'-phosphorothioate
  modified_base 13: mod_base = OTHER; note = 2'-deoxythymidine 3'-phosphorothioate
  modified_base 14: mod_base = OTHER; note = 5-methyl 2'-deoxycytidine 3'-phosphorothioate
  modified_base 15: mod_base = OTHER; note = 2'-deoxyadenosine 3'-phosphorothioate
  modified_base 16: mod_base = OTHER; note = 2'-O-methoxyethyl thymidine 3'-phosphodiester
  modified_base 17: mod_base = OTHER; note = 2'-O-methoxyethyl guanosine 3'-phosphodiester
  modified_base 18: mod_base = OTHER; note = 2'-O-methoxyethyl thymidine 3'-phosphorothioate
  modified_base 19: mod_base = OTHER; note = 2'-O-methoxyethyl guanosine 3'-phosphorothioate
  modified_base 20: mod_base = OTHER; note = 2'-O-methoxyethyl 5-methyl cytidine
tctgtacttttctcatgtgc

SEQ ID NO: 3326 - DNA, 18 bp, synthetic construct
  source 1..18: mol_type = other DNA
  modified_base 1: mod_base = OTHER; note = 2'-O-methoxyethyl thymidine 3'-phosphorothioate
  modified_base 2: mod_base = OTHER; note = 2'-O-methoxyethyl guanosine 3'-phosphodiester
  modified_base 3..4: mod_base = OTHER; note = 2'-O-methoxyethyl 5-methyl cytidine 3'-phosphodiester
  modified_base 5: mod_base = OTHER; note = 2'-O-methoxyethyl thymidine 3'-phosphorothioate
  modified_base 6: mod_base = OTHER; note = 5-methyl 2'-deoxycytidine 3'-phosphorothioate
  modified_base 7: mod_base = OTHER; note = 2'-deoxythymidine 3'-phosphorothioate
  modified_base 8: mod_base = OTHER; note = 2'-deoxyadenosine 3'-phosphorothioate
  modified_base 9: mod_base = OTHER; note = 5-methyl 2'-deoxycytidine 3'-phosphorothioate
  modified_base 10: mod_base = OTHER; note = 2'-deoxythymidine 3'-phosphorothioate
  modified_base 11: mod_base = OTHER; note = 5-methyl 2'-deoxycytidine 3'-phosphorothioate
  modified_base 12..13: mod_base = OTHER; note = 2'-deoxyguanosine 3'-phosphorothioate
  modified_base 14: mod_base = OTHER; note = 2'-O-methoxyethyl thymidine 3'-phosphodiester
  modified_base 15: mod_base = OTHER; note = 2'-O-methoxyethyl 5-methyl cytidine 3'-phosphodiester
  modified_base 16: mod_base = OTHER; note = 2'-O-methoxyethyl 5-methyl cytidine 3'-phosphorothioate
  modified_base 17: mod_base = OTHER; note = 2'-O-methoxyethyl adenosine 3'-phosphorothioate
  modified_base 18: mod_base = OTHER; note = 2'-O-methoxyethyl adenosine
tgcctctactcggtccaa

SEQ ID NO: 3327 - DNA, 18 bp, synthetic construct
  source 1..18: mol_type = other DNA
  modified_base 1: mod_base = OTHER; note = 2'-O-methoxyethyl thymidine 3'-phosphorothioate
  modified_base 2: mod_base = OTHER; note = 2'-O-methoxyethyl guanosine 3'-phosphodiester
  modified_base 3: mod_base = OTHER; note = 2'-O-methoxyethyl thymidine 3'-phosphodiester
  modified_base 4: mod_base = OTHER; note = 2'-O-methoxyethyl adenosine 3'-phosphodiester
  modified_base 5: mod_base = OTHER; note = 2'-O-methoxyethyl 5-methyl cytidine 3'-phosphorothioate
  modified_base 6..9: mod_base = OTHER; note = 2'-deoxythymidine 3'-phosphorothioate
  modified_base 10: mod_base = OTHER; note = 5-methyl 2'-deoxycytidine 3'-phosphorothioate
  modified_base 11: mod_base = OTHER; note = 2'-deoxythymidine 3'-phosphorothioate
  modified_base 12: mod_base = OTHER; note = 5-methyl 2'-deoxycytidine 3'-phosphorothioate
  modified_base 13: mod_base = OTHER; note = 2'-deoxyadenosine 3'-phosphorothioate
  modified_base 14: mod_base = OTHER; note = 2'-O-methoxyethyl thymidine 3'-phosphodiester
  modified_base 15: mod_base = OTHER; note = 2'-O-methoxyethyl guanosine 3'-phosphodiester
  modified_base 16: mod_base = OTHER; note = 2'-O-methoxyethyl thymidine 3'-phosphorothioate
  modified_base 17: mod_base = OTHER; note = 2'-O-methoxyethyl guanosine 3'-phosphorothioate
  modified_base 18: mod_base = OTHER; note = 2'-O-methoxyethyl 5-methyl cytidine
tgtacttttctcatgtgc

SEQ ID NO: 3328 - DNA, 18 bp, synthetic construct
  source 1..18: mol_type = other DNA
  modified_base 1: mod_base = OTHER; note = 2'-O-methoxyethyl guanosine 3'-phosphorothioate
  modified_base 2: mod_base = OTHER; note = 2'-O-methoxyethyl guanosine 3'-phosphodiester
  modified_base 3: mod_base = OTHER; note = 2'-O-methoxyethyl adenosine 3'-phosphodiester
  modified_base 4: mod_base = OTHER; note = 2'-O-methoxyethyl thymidine 3'-phosphodiester
  modified_base 5: mod_base = OTHER; note = 2'-O-methoxyethyl thymidine 3'-phosphorothioate
  modified_base 6: mod_base = OTHER; note = 5-methyl 2'-deoxycytidine 3'-phosphorothioate
  modified_base 7: mod_base = OTHER; note = 2'-deoxythymidine 3'-phosphorothioate
  modified_base 8: mod_base = OTHER; note = 2'-deoxyguanosine 3'-phosphorothioate
  modified_base 9: mod_base = OTHER; note = 2'-deoxythymidine 3'-phosphorothioate
  modified_base 10: mod_base = OTHER; note = 2'-deoxyadenosine 3'-phosphorothioate
  modified_base 11: mod_base = OTHER; note = 5-methyl 2'-deoxycytidine 3'-phosphorothioate
  modified_base 12..13: mod_base = OTHER; note = 2'-deoxythymidine 3'-phosphorothioate
  modified_base 14..15: mod_base = OTHER; note = 2'-O-methoxyethyl thymidine 3'-phosphodiester
  modified_base 16: mod_base = OTHER; note = 2'-O-methoxyethyl 5-methyl cytidine 3'-phosphorothioate
  modified_base 17: mod_base = OTHER; note = 2'-O-methoxyethyl thymidine 3'-phosphorothioate
  modified_base 18: mod_base = OTHER; note = 2'-O-methoxyethyl 5-methyl cytidine
ggattctgtacttttctc

SEQ ID NO: 3329 - DNA, 20 bp, synthetic construct
  source 1..20: mol_type = other DNA
  modified_base 1: mod_base = OTHER; note = 2'-O-methoxyethyl 5-methyl cytidine 3'-phosphorothioate
  modified_base 2: mod_base = OTHER; note = 2'-O-methoxyethyl thymidine 3'-phosphodiester
  modified_base 3: mod_base = OTHER; note = 2'-O-methoxyethyl 5-methyl cytidine 3'-phosphodiester
  modified_base 4: mod_base = OTHER; note = 2'-O-methoxyethyl thymidine 3'-phosphodiester
  modified_base 5: mod_base = OTHER; note = 2'-O-methoxyethyl 5-methyl cytidine 3'-phosphorothioate
  modified_base 6: mod_base = OTHER; note = 5-methyl 2'-deoxycytidine 3'-phosphorothioate
  modified_base 7: mod_base = OTHER; note = 2'-deoxyadenosine 3'-phosphorothioate
  modified_base 8..9: mod_base = OTHER; note = 2'-deoxythymidine 3'-phosphorothioate
  modified_base 10: mod_base = OTHER; note = 2'-deoxyadenosine 3'-phosphorothioate
  modified_base 11..13: mod_base = OTHER; note = 2'-deoxythymidine 3'-phosphorothioate
  modified_base 14: mod_base = OTHER; note = 5-methyl 2'-deoxycytidine 3'-phosphorothioate
  modified_base 15: mod_base = OTHER; note = 2'-deoxythymidine 3'-phosphorothioate
  modified_base 16: mod_base = OTHER; note = 2'-O-methoxyethyl thymidine 3'-phosphodiester
  modified_base 17: mod_base = OTHER; note = 2'-O-methoxyethyl 5-methyl cytidine 3'-phosphodiester
  modified_base 18: mod_base = OTHER; note = 2'-O-methoxyethyl adenosine 3'-phosphorothioate
  modified_base 19: mod_base = OTHER; note = 2'-O-methoxyethyl 5-methyl cytidine 3'-phosphorothioate
  modified_base 20: mod_base = OTHER; note = 2'-O-methoxyethyl guanosine
ctctccattatttcttcacg

SEQ ID NO: 3330 - DNA, 20 bp, synthetic construct
  source 1..20: mol_type = other DNA
  modified_base 1: mod_base = OTHER; note = 2'-O-methoxyethyl thymidine 3'-phosphorothioate
  modified_base 2..3: mod_base = OTHER; note = 2'-O-methoxyethyl guanosine 3'-phosphodiester
  modified_base 4: mod_base = OTHER; note = 2'-O-methoxyethyl adenosine 3'-phosphodiester
  modified_base 5: mod_base = OTHER; note = 2'-O-methoxyethyl thymidine 3'-phosphodiester
  modified_base 6: mod_base = OTHER; note = 2'-deoxythymidine 3'-phosphorothioate
  modified_base 7: mod_base = OTHER; note = 5-methyl 2'-deoxycytidine 3'-phosphorothioate
  modified_base 8: mod_base = OTHER; note = 2'-deoxythymidine 3'-phosphorothioate
  modified_base 9: mod_base = OTHER; note = 2'-deoxyguanosine 3'-phosphorothioate
  modified_base 10: mod_base = OTHER; note = 2'-deoxythymidine 3'-phosphorothioate
  modified_base 11: mod_base = OTHER; note = 2'-deoxyadenosine 3'-phosphorothioate
  modified_base 12: mod_base = OTHER; note = 5-methyl 2'-deoxycytidine 3'-phosphorothioate
  modified_base 13..15: mod_base = OTHER; note = 2'-deoxythymidine 3'-phosphorothioate
  modified_base 16: mod_base = OTHER; note = 2'-O-methoxyethyl thymidine 3'-phosphodiester
  modified_base 17: mod_base = OTHER; note = 2'-O-methoxyethyl 5-methyl cytidine 3'-phosphodiester
  modified_base 18: mod_base = OTHER; note = 2'-O-methoxyethyl thymidine 3'-phosphorothioate
  modified_base 19: mod_base = OTHER; note = 2'-O-methoxyethyl 5-methyl cytidine 3'-phosphorothioate
  modified_base 20: mod_base = OTHER; note = 2'-O-methoxyethyl adenosine
tggattctgtacttttctca

SEQ ID NO: 3331 - DNA, 20 bp, synthetic construct
  source 1..20: mol_type = other DNA
  modified_base 1: mod_base = OTHER; note = 2'-O-methoxyethyl 5-methyl cytidine 3'-phosphorothioate
  modified_base 2: mod_base = OTHER; note = 2'-O-methoxyethyl thymidine 3'-phosphodiester
  modified_base 3..4: mod_base = OTHER; note = 2'-O-methoxyethyl guanosine 3'-phosphodiester
  modified_base 5: mod_base = OTHER; note = 2'-O-methoxyethyl adenosine 3'-phosphodiester
  modified_base 6..7: mod_base = OTHER; note = 2'-deoxythymidine 3'-phosphorothioate
  modified_base 8: mod_base = OTHER; note = 5-methyl 2'-deoxycytidine 3'-phosphorothioate
  modified_base 9: mod_base = OTHER; note = 2'-deoxythymidine 3'-phosphorothioate
  modified_base 10: mod_base = OTHER; note = 2'-deoxyguanosine 3'-phosphorothioate
  modified_base 11: mod_base = OTHER; note = 2'-deoxythymidine 3'-phosphorothioate
  modified_base 12: mod_base = OTHER; note = 2'-deoxyadenosine 3'-phosphorothioate
  modified_base 13: mod_base = OTHER; note = 5-methyl 2'-deoxycytidine 3'-phosphorothioate
  modified_base 14..15: mod_base = OTHER; note = 2'-deoxythymidine 3'-phosphorothioate
  modified_base 16..17: mod_base = OTHER; note = 2'-O-methoxyethyl thymidine 3'-phosphodiester
  modified_base 18: mod_base = OTHER; note = 2'-O-methoxyethyl 5-methyl cytidine 3'-phosphorothioate
  modified_base 19: mod_base = OTHER; note = 2'-O-methoxyethyl thymidine 3'-phosphorothioate
  modified_base 20: mod_base = OTHER; note = 2'-O-methoxyethyl 5-methyl cytidine
ctggattctgtacttttctc

SEQ ID NO: 3332 - DNA, 20 bp, synthetic construct
  source 1..20: mol_type = other DNA
  modified_base 1: mod_base = OTHER; note = 2'-O-methoxyethyl guanosine 3'-phosphorothioate
  modified_base 2..3: mod_base = OTHER; note = 2'-O-methoxyethyl thymidine 3'-phosphodiester
  modified_base 4: mod_base = OTHER; note = 2'-O-methoxyethyl adenosine 3'-phosphodiester
  modified_base 5: mod_base = OTHER; note = 2'-O-methoxyethyl 5-methyl cytidine 3'-phosphodiester
  modified_base 6: mod_base = OTHER; note = 2'-deoxythymidine 3'-phosphorothioate
  modified_base 7: mod_base = OTHER; note = 2'-deoxyguanosine 3'-phosphorothioate
  modified_base 8..10: mod_base = OTHER; note = 2'-deoxythymidine 3'-phosphorothioate
  modified_base 11: mod_base = OTHER; note = 5-methyl 2'-deoxycytidine 3'-phosphorothioate
  modified_base 12: mod_base = OTHER; note = 2'-deoxyguanosine 3'-phosphorothioate
  modified_base 13: mod_base = OTHER; note = 2'-deoxyadenosine 3'-phosphorothioate
  modified_base 14..15: mod_base = OTHER; note = 5-methyl 2'-deoxycytidine 3'-phosphorothioate
  modified_base 16: mod_base = OTHER; note = 2'-O-methoxyethyl thymidine 3'-phosphodiester
  modified_base 17: mod_base = OTHER; note = 2'-O-methoxyethyl 5-methyl cytidine 3'-phosphodiester
  modified_base 18..19: mod_base = OTHER; note = 2'-O-methoxyethyl guanosine 3'-phosphorothioate
  modified_base 20: mod_base = OTHER; note = 2'-O-methoxyethyl adenosine
gttactgtttcgacctcgga

SEQ ID NO: 3333 - DNA, 20 bp, synthetic construct
  source 1..20: mol_type = other DNA
  modified_base 1: mod_base = OTHER; note = 2'-O-methoxyethyl thymidine 3'-phosphorothioate
  modified_base 2: mod_base = OTHER; note = 2'-O-methoxyethyl adenosine 3'-phosphodiester
  modified_base 3: mod_base = OTHER; note = 2'-O-methoxyethyl 5-methyl cytidine 3'-phosphodiester
  modified_base 4: mod_base = OTHER; note = 2'-O-methoxyethyl thymidine 3'-phosphodiester
  modified_base 5..7: mod_base = OTHER; note = 2'-deoxythymidine 3'-phosphorothioate
  modified_base 8: mod_base = OTHER; note = 5-methyl 2'-deoxycytidine 3'-phosphorothioate
  modified_base 9: mod_base = OTHER; note = 2'-deoxythymidine 3'-phosphorothioate
  modified_base 10: mod_base = OTHER; note = 5-methyl 2'-deoxycytidine 3'-phosphorothioate
  modified_base 11: mod_base = OTHER; note = 2'-deoxyadenosine 3'-phosphorothioate
  modified_base 12: mod_base = OTHER; note = 2'-deoxythymidine 3'-phosphorothioate
  modified_base 13: mod_base = OTHER; note = 2'-deoxyguanosine 3'-phosphorothioate
  modified_base 14: mod_base = OTHER; note = 2'-deoxythymidine 3'-phosphorothioate
  modified_base 15: mod_base = OTHER; note = 2'-O-methoxyethyl guanosine 3'-phosphodiester
  modified_base 16: mod_base = OTHER; note = 2'-O-methoxyethyl 5-methyl cytidine 3'-phosphodiester
  modified_base 17: mod_base = OTHER; note = 2'-O-methoxyethyl guanosine 3'-phosphodiester
  modified_base 18: mod_base = OTHER; note = 2'-O-methoxyethyl guanosine 3'-phosphorothioate
  modified_base 19: mod_base = OTHER; note = 2'-O-methoxyethyl 5-methyl cytidine 3'-phosphorothioate
  modified_base 20: mod_base = OTHER; note = 2'-O-methoxyethyl adenosine
tacttttctcatgtgcggca

SEQ ID NO: 3334 - DNA, 20 bp, synthetic construct
  source 1..20: mol_type = other DNA
  modified_base 1: mod_base = OTHER; note = 2'-O-methoxyethyl 5-methyl cytidine 3'-phosphorothioate
  modified_base 2: mod_base = OTHER; note = 2'-O-methoxyethyl thymidine 3'-phosphodiester
  modified_base 3..4: mod_base = OTHER; note = 2'-O-methoxyethyl guanosine 3'-phosphodiester
  modified_base 5: mod_base = OTHER; note = 2'-deoxyadenosine 3'-phosphorothioate
  modified_base 6..7: mod_base = OTHER; note = 2'-deoxythymidine 3'-phosphorothioate
  modified_base 8: mod_base = OTHER; note = 5-methyl 2'-deoxycytidine 3'-phosphorothioate
  modified_base 9: mod_base = OTHER; note = 2'-deoxythymidine 3'-phosphorothioate
  modified_base 10: mod_base = OTHER; note = 2'-deoxyguanosine 3'-phosphorothioate
  modified_base 11: mod_base = OTHER; note = 2'-deoxythymidine 3'-phosphorothioate
  modified_base 12: mod_base = OTHER; note = 2'-deoxyadenosine 3'-phosphorothioate
  modified_base 13: mod_base = OTHER; note = 5-methyl 2'-deoxycytidine 3'-phosphorothioate
  modified_base 14: mod_base = OTHER; note = 2'-deoxythymidine 3'-phosphorothioate
  modified_base 15..17: mod_base = OTHER; note = 2'-O-methoxyethyl thymidine 3'-phosphodiester
  modified_base 18: mod_base = OTHER; note = 2'-O-methoxyethyl 5-methyl cytidine 3'-phosphorothioate
  modified_base 19: mod_base = OTHER; note = 2'-O-methoxyethyl thymidine 3'-phosphorothioate
  modified_base 20: mod_base = OTHER; note = 2'-O-methoxyethyl 5-methyl cytidine
ctggattctgtacttttctc

SEQ ID NO: 3335 - DNA, 20 bp, synthetic construct
  source 1..20: mol_type = other DNA
  modified_base 1: mod_base = OTHER; note = 2'-O-methoxyethyl 5-methyl cytidine 3'-phosphorothioate
  modified_base 2..3: mod_base = OTHER; note = 2'-O-methoxyethyl thymidine 3'-phosphodiester
  modified_base 4: mod_base = OTHER; note = 2'-O-methoxyethyl adenosine 3'-phosphodiester
  modified_base 5: mod_base = OTHER; note = 2'-O-methoxyethyl guanosine 3'-phosphodiester
  modified_base 6: mod_base = OTHER; note = 2'-O-methoxyethyl adenosine 3'-phosphodiester
  modified_base 7: mod_base = OTHER; note = 2'-deoxyguanosine 3'-phosphorothioate
  modified_base 8..12: mod_base = OTHER; note = 2'-deoxythymidine 3'-phosphorothioate
  modified_base 13: mod_base = OTHER; note = 2'-deoxyguanosine 3'-phosphorothioate
  modified_base 14..15: mod_base = OTHER; note = 5-methyl 2'-deoxycytidine 3'-phosphorothioate
  modified_base 16: mod_base = OTHER; note = 2'-deoxythymidine 3'-phosphorothioate
  modified_base 17: mod_base = OTHER; note = 2'-O-methoxyethyl thymidine 3'-phosphodiester
  modified_base 18..19: mod_base = OTHER; note = 2'-O-methoxyethyl 5-methyl cytidine 3'-phosphorothioate
  modified_base 20: mod_base = OTHER; note = 2'-O-methoxyethyl adenosine
cttagagtttttgccttcca

SEQ ID NO: 3336 - DNA, 20 bp, synthetic construct
  source 1..20: mol_type = other DNA
  modified_base 1: mod_base = OTHER; note = 2'-O-methoxyethyl guanosine 3'-phosphorothioate
  modified_base 2: mod_base = OTHER; note = 2'-O-methoxyethyl 5-methyl cytidine 3'-phosphodiester
  modified_base 3..4: mod_base = OTHER; note = 2'-O-methoxyethyl thymidine 3'-phosphodiester
  modified_base 5: mod_base = OTHER; note = 2'-O-methoxyethyl adenosine 3'-phosphodiester
  modified_base 6: mod_base = OTHER; note = 2'-O-methoxyethyl guanosine 3'-phosphodiester
  modified_base 7: mod_base = OTHER; note = 2'-deoxyadenosine 3'-phosphorothioate
  modified_base 8: mod_base = OTHER; note = 2'-deoxyguanosine 3'-phosphorothioate
  modified_base 9..13: mod_base = OTHER; note = 2'-deoxythymidine 3'-phosphorothioate
  modified_base 14: mod_base = OTHER; note = 2'-deoxyguanosine 3'-phosphorothioate
  modified_base 15..16: mod_base = OTHER; note = 5-methyl 2'-deoxycytidine 3'-phosphorothioate
  modified_base 17: mod_base = OTHER; note = 2'-O-methoxyethyl thymidine 3'-phosphodiester
  modified_base 18: mod_base = OTHER; note = 2'-O-methoxyethyl thymidine 3'-phosphorothioate
  modified_base 19: mod_base = OTHER; note = 2'-O-methoxyethyl 5-methyl cytidine 3'-phosphorothioate
  modified_base 20: mod_base = OTHER; note = 2'-O-methoxyethyl 5-methyl cytidine
gcttagagtttttgccttcc

SEQ ID NO: 3337 - DNA, 20 bp, synthetic construct
  source 1..20: mol_type = other DNA
  modified_base 1: mod_base = OTHER; note = 2'-O-methoxyethyl adenosine 3'-phosphorothioate
  modified_base 2: mod_base = OTHER; note = 2'-O-methoxyethyl guanosine 3'-phosphodiester
  modified_base 3: mod_base = OTHER; note = 2'-O-methoxyethyl 5-methyl cytidine 3'-phosphodiester
  modified_base 4..5: mod_base = OTHER; note = 2'-O-methoxyethyl thymidine 3'-phosphodiester
  modified_base 6: mod_base = OTHER; note = 2'-O-methoxyethyl adenosine 3'-phosphodiester
  modified_base 7: mod_base = OTHER; note = 2'-deoxyguanosine 3'-phosphorothioate
  modified_base 8: mod_base = OTHER; note = 2'-deoxyadenosine 3'-phosphorothioate
  modified_base 9: mod_base = OTHER; note = 2'-deoxyguanosine 3'-phosphorothioate
  modified_base 10..14: mod_base = OTHER; note = 2'-deoxythymidine 3'-phosphorothioate
  modified_base 15: mod_base = OTHER; note = 2'-deoxyguanosine 3'-phosphorothioate
  modified_base 16: mod_base = OTHER; note = 5-methyl 2'-deoxycytidine 3'-phosphorothioate
  modified_base 17: mod_base = OTHER; note = 2'-O-methoxyethyl 5-methyl cytidine 3'-phosphodiester
  modified_base 18..19: mod_base = OTHER; note = 2'-O-methoxyethyl thymidine 3'-phosphorothioate
  modified_base 20: mod_base = OTHER; note = 2'-O-methoxyethyl 5-methyl cytidine
agcttagagtttttgccttc

SEQ ID NO: 3338 - DNA, 20 bp, synthetic construct
  source 1..20: mol_type = other DNA
  modified_base 1: mod_base = OTHER; note = 2'-O-methoxyethyl 5-methyl cytidine 3'-phosphorothioate
  modified_base 2: mod_base = OTHER; note = 2'-O-methoxyethyl guanosine 3'-phosphodiester
  modified_base 3: mod_base = OTHER; note = 2'-O-methoxyethyl thymidine 3'-phosphodiester
  modified_base 4: mod_base = OTHER; note = 2'-O-methoxyethyl adenosine 3'-phosphodiester
  modified_base 5: mod_base = OTHER; note = 2'-O-methoxyethyl thymidine 3'-phosphodiester
  modified_base 6: mod_base = OTHER; note = 2'-O-methoxyethyl guanosine 3'-phosphodiester
  modified_base 7..9: mod_base = OTHER; note = 2'-deoxythymidine 3'-phosphorothioate
  modified_base 10: mod_base = OTHER; note = 2'-deoxyguanosine 3'-phosphorothioate
  modified_base 11: mod_base = OTHER; note = 2'-deoxythymidine 3'-phosphorothioate
  modified_base 12: mod_base = OTHER; note = 5-methyl 2'-deoxycytidine 3'-phosphorothioate
  modified_base 13: mod_base = OTHER; note = 2'-deoxythymidine 3'-phosphorothioate
  modified_base 14: mod_base = OTHER; note = 2'-deoxyguanosine 3'-phosphorothioate
  modified_base 15: mod_base = OTHER; note = 2'-deoxythymidine 3'-phosphorothioate
  modified_base 16: mod_base = OTHER; note = 5-methyl 2'-deoxycytidine 3'-phosphorothioate
  modified_base 17: mod_base = OTHER; note = 2'-O-methoxyethyl thymidine 3'-phosphodiester
  modified_base 18: mod_base = OTHER; note = 2'-O-methoxyethyl thymidine 3'-phosphorothioate
  modified_base 19: mod_base = OTHER; note = 2'-O-methoxyethyl adenosine 3'-phosphorothioate
  modified_base 20: mod_base = OTHER; note = 2'-O-methoxyethyl thymidine
cgtatgtttgtctgtcttat

SEQ ID NO: 3339 - DNA, 20 bp, synthetic construct
  source 1..20: mol_type = other DNA
  modified_base 1: mod_base = OTHER; note = 2'-O-methoxyethyl adenosine 3'-phosphorothioate
  modified_base 2: mod_base = OTHER; note = 2'-O-methoxyethyl 5-methyl cytidine 3'-phosphodiester
  modified_base 3..6: mod_base = OTHER; note = 2'-O-methoxyethyl thymidine 3'-phosphodiester
  modified_base 7: mod_base = OTHER; note = 5-methyl 2'-deoxycytidine 3'-phosphorothioate
  modified_base 8: mod_base = OTHER; note = 2'-deoxythymidine 3'-phosphorothioate
  modified_base 9: mod_base = OTHER; note = 5-methyl 2'-deoxycytidine 3'-phosphorothioate
  modified_base 10: mod_base = OTHER; note = 2'-deoxyadenosine 3'-phosphorothioate
  modified_base 11: mod_base = OTHER; note = 2'-deoxythymidine 3'-phosphorothioate
  modified_base 12: mod_base = OTHER; note = 2'-deoxyguanosine 3'-phosphorothioate
  modified_base 13: mod_base = OTHER; note = 2'-deoxythymidine 3'-phosphorothioate
  modified_base 14: mod_base = OTHER; note = 2'-deoxyguanosine 3'-phosphorothioate
  modified_base 15: mod_base = OTHER; note = 5-methyl 2'-deoxycytidine 3'-phosphorothioate
  modified_base 16: mod_base = OTHER; note = 2'-deoxyguanosine 3'-phosphorothioate
  modified_base 17: mod_base = OTHER; note = 2'-O-methoxyethyl guanosine 3'-phosphodiester
  modified_base 18: mod_base = OTHER; note = 2'-O-methoxyethyl 5-methyl cytidine 3'-phosphorothioate
  modified_base 19: mod_base = OTHER; note = 2'-O-methoxyethyl adenosine 3'-phosphorothioate
  modified_base 20: mod_base = OTHER; note = 2'-O-methoxyethyl thymidine
acttttctcatgtgcggcat

SEQ ID NO: 3340 - DNA, 20 bp, synthetic construct
  source 1..20: mol_type = other DNA
  modified_base 1: mod_base = OTHER; note = 2'-O-methoxyethyl thymidine 3'-phosphorothioate
  modified_base 2: mod_base = OTHER; note = 2'-O-methoxyethyl adenosine 3'-phosphodiester
  modified_base 3: mod_base = OTHER; note = 2'-O-methoxyethyl 5-methyl cytidine 3'-phosphodiester
  modified_base 4..6: mod_base = OTHER; note = 2'-O-methoxyethyl thymidine 3'-phosphodiester
  modified_base 7: mod_base = OTHER; note = 2'-deoxythymidine 3'-phosphorothioate
  modified_base 8: mod_base = OTHER; note = 5-methyl 2'-deoxycytidine 3'-phosphorothioate
  modified_base 9: mod_base = OTHER; note = 2'-deoxythymidine 3'-phosphorothioate
  modified_base 10: mod_base = OTHER; note = 5-methyl 2'-deoxycytidine 3'-phosphorothioate
  modified_base 11: mod_base = OTHER; note = 2'-deoxyadenosine 3'-phosphorothioate
  modified_base 12: mod_base = OTHER; note = 2'-deoxythymidine 3'-phosphorothioate
  modified_base 13: mod_base = OTHER; note = 2'-deoxyguanosine 3'-phosphorothioate
  modified_base 14: mod_base = OTHER; note = 2'-deoxythymidine 3'-phosphorothioate
  modified_base 15: mod_base = OTHER; note = 2'-deoxyguanosine 3'-phosphorothioate
  modified_base 16: mod_base = OTHER; note = 5-methyl 2'-deoxycytidine 3'-phosphorothioate
  modified_base 17: mod_base = OTHER; note = 2'-O-methoxyethyl guanosine 3'-phosphodiester
  modified_base 18: mod_base = OTHER; note = 2'-O-methoxyethyl guanosine 3'-phosphorothioate
  modified_base 19: mod_base = OTHER; note = 2'-O-methoxyethyl 5-methyl cytidine 3'-phosphorothioate
  modified_base 20: mod_base = OTHER; note = 2'-O-methoxyethyl adenosine
tacttttctcatgtgcggca

SEQ ID NO: 3341 - DNA, 20 bp, synthetic construct
  source 1..20: mol_type = other DNA
  modified_base 1: mod_base = OTHER; note = 2'-O-methoxyethyl thymidine 3'-phosphorothioate
  modified_base 2: mod_base = OTHER; note = 2'-O-methoxyethyl 5-methyl cytidine 3'-phosphodiester
  modified_base 3: mod_base = OTHER; note = 2'-O-methoxyethyl thymidine 3'-phosphodiester
  modified_base 4: mod_base = OTHER; note = 2'-O-methoxyethyl guanosine 3'-phosphodiester
  modified_base 5: mod_base = OTHER; note = 2'-O-methoxyethyl thymidine 3'-phosphodiester
  modified_base 6: mod_base = OTHER; note = 2'-O-methoxyethyl adenosine 3'-phosphodiester
  modified_base 7: mod_base = OTHER; note = 5-methyl 2'-deoxycytidine 3'-phosphorothioate
  modified_base 8..11: mod_base = OTHER; note = 2'-deoxythymidine 3'-phosphorothioate
  modified_base 12: mod_base = OTHER; note = 5-methyl 2'-deoxycytidine 3'-phosphorothioate
  modified_base 13: mod_base = OTHER; note = 2'-deoxythymidine 3'-phosphorothioate
  modified_base 14: mod_base = OTHER; note = 5-methyl 2'-deoxycytidine 3'-phosphorothioate
  modified_base 15: mod_base = OTHER; note = 2'-deoxyadenosine 3'-phosphorothioate
  modified_base 16: mod_base = OTHER; note = 2'-deoxythymidine 3'-phosphorothioate
  modified_base 17: mod_base = OTHER; note = 2'-O-methoxyethyl guanosine 3'-phosphodiester
  modified_base 18: mod_base = OTHER; note = 2'-O-methoxyethyl thymidine 3'-phosphorothioate
  modified_base 19: mod_base = OTHER; note = 2'-O-methoxyethyl guanosine 3'-phosphorothioate
  modified_base 20: mod_base = OTHER; note = 2'-O-methoxyethyl 5-methyl cytidine
tctgtacttttctcatgtgc

SEQ ID NO: 3342 - DNA, 20 bp, synthetic construct
  source 1..20: mol_type = other DNA
  modified_base 1: mod_base = OTHER; note = 2'-O-methoxyethyl thymidine 3'-phosphorothioate
  modified_base 2: mod_base = OTHER; note = 2'-O-methoxyethyl thymidine 3'-phosphodiester
  modified_base 3: mod_base = OTHER; note = 2'-O-methoxyethyl 5-methyl cytidine 3'-phosphodiester
  modified_base 4: mod_base = OTHER; note = 2'-O-methoxyethyl thymidine 3'-phosphodiester
  modified_base 5: mod_base = OTHER; note = 2'-O-methoxyethyl 5-methyl cytidine 3'-phosphodiester
  modified_base 6: mod_base = OTHER; note = 2'-O-methoxyethyl thymidine 3'-phosphodiester
  modified_base 7: mod_base = OTHER; note = 2'-deoxyadenosine 3'-phosphorothioate
  modified_base 8..10: mod_base = OTHER; note = 2'-deoxythymidine 3'-phosphorothioate
  modified_base 11: mod_base = OTHER; note = 5-methyl 2'-deoxycytidine 3'-phosphorothioate
  modified_base 12..14: mod_base = OTHER; note = 2'-deoxythymidine 3'-phosphorothioate
  modified_base 15: mod_base = OTHER; note = 2'-deoxyguanosine 3'-phosphorothioate
  modified_base 16: mod_base = OTHER; note = 2'-deoxythymidine 3'-phosphorothioate
  modified_base 17: mod_base = OTHER; note = 2'-O-methoxyethyl 5-methyl cytidine 3'-phosphodiester
  modified_base 18: mod_base = OTHER; note = 2'-O-methoxyethyl 5-methyl cytidine 3'-phosphorothioate
  modified_base 19: mod_base = OTHER; note = 2'-O-methoxyethyl adenosine 3'-phosphorothioate
  modified_base 20: mod_base = OTHER; note = 2'-O-methoxyethyl guanosine
ttctctatttctttgtccag

SEQ ID NO: 3343 - DNA, 20 bp, synthetic construct
  source 1..20: mol_type = other DNA
  modified_base 1: mod_base = OTHER; note = 2'-O-methoxyethyl adenosine 3'-phosphorothioate
  modified_base 2: mod_base = OTHER; note = 2'-O-methoxyethyl 5-methyl cytidine 3'-phosphodiester
  modified_base 3: mod_base = OTHER; note = 2'-O-methoxyethyl adenosine 3'-phosphodiester
  modified_base 4: mod_base = OTHER; note = 2'-O-methoxyethyl 5-methyl cytidine 3'-phosphodiester
  modified_base 5: mod_base = OTHER; note = 2'-O-methoxyethyl adenosine 3'-phosphodiester
  modified_base 6: mod_base = OTHER; note = 2'-O-methoxyethyl guanosine 3'-phosphodiester
  modified_base 7..9: mod_base = OTHER; note = 2'-deoxythymidine 3'-phosphorothioate
  modified_base 10: mod_base = OTHER; note = 5-methyl 2'-deoxycytidine 3'-phosphorothioate
  modified_base 11: mod_base = OTHER; note = 2'-deoxyadenosine 3'-phosphorothioate
  modified_base 12: mod_base = OTHER; note = 5-methyl 2'-deoxycytidine 3'-phosphorothioate
  modified_base 13: mod_base = OTHER; note = 2'-deoxythymidine 3'-phosphorothioate
  modified_base 14: mod_base = OTHER; note = 2'-deoxyadenosine 3'-phosphorothioate
  modified_base 15..16: mod_base = OTHER; note = 2'-deoxyguanosine 3'-phosphorothioate
  modified_base 17: mod_base = OTHER; note = 2'-O-methoxyethyl thymidine 3'-phosphodiester
  modified_base 18: mod_base = OTHER; note = 2'-O-methoxyethyl thymidine 3'-phosphorothioate
  modified_base 19: mod_base = OTHER; note = 2'-O-methoxyethyl 5-methyl cytidine 3'-phosphorothioate
  modified_base 20: mod_base = OTHER; note = 2'-O-methoxyethyl thymidine
acacagtttcactaggttct

SEQ ID NO: 3344 - DNA, 20 bp, synthetic construct
  source 1..20: mol_type = other DNA
  modified_base 1: mod_base = OTHER; note = 2'-O-methoxyethyl thymidine 3'-phosphorothioate
  modified_base 2..3: mod_base = OTHER; note = 2'-O-methoxyethyl guanosine 3'-phosphodiester
  modified_base 4: mod_base = OTHER; note = 2'-O-methoxyethyl thymidine 3'-phosphodiester
  modified_base 5..6: mod_base = OTHER; note = 2'-O-methoxyethyl guanosine 3'-phosphodiester
  modified_base 7: mod_base = OTHER; note = 2'-deoxythymidine 3'-phosphorothioate
  modified_base 8: mod_base = OTHER; note = 2'-deoxyguanosine 3'-phosphorothioate
  modified_base 9: mod_base = OTHER; note = 2'-deoxythymidine 3'-phosphorothioate
  modified_base 10: mod_base = OTHER; note = 2'-deoxyguanosine 3'-phosphorothioate
  modified_base 11: mod_base = OTHER; note = 5-methyl 2'-deoxycytidine 3'-phosphorothioate
  modified_base 12: mod_base = OTHER; note = 2'-deoxyguanosine 3'-phosphorothioate
  modified_base 13: mod_base = OTHER; note = 5-methyl 2'-deoxycytidine 3'-phosphorothioate
  modified_base 14: mod_base = OTHER; note = 2'-deoxyadenosine 3'-phosphorothioate
  modified_base 15: mod_base = OTHER; note = 2'-deoxythymidine 3'-phosphorothioate
  modified_base 16: mod_base = OTHER; note = 2'-deoxyguanosine 3'-phosphorothioate
  modified_base 17: mod_base = OTHER; note = 2'-O-methoxyethyl thymidine 3'-phosphodiester
  modified_base 18: mod_base = OTHER; note = 2'-O-methoxyethyl adenosine 3'-phosphorothioate
  modified_base 19: mod_base = OTHER; note = 2'-O-methoxyethyl guanosine 3'-phosphorothioate
  modified_base 20: mod_base = OTHER; note = 2'-O-methoxyethyl adenosine
tggtggtgtgcgcatgtaga

SEQ ID NO: 3345 - DNA, 20 bp, synthetic construct
  source 1..20: mol_type = other DNA
  modified_base 1: mod_base = OTHER; note = 2'-O-methoxyethyl guanosine 3'-phosphorothioate
  modified_base 2..3: mod_base = OTHER; note = 2'-O-methoxyethyl thymidine 3'-phosphodiester
  modified_base 4: mod_base = OTHER; note = 2'-O-methoxyethyl adenosine 3'-phosphodiester
  modified_base 5: mod_base = OTHER; note = 2'-O-methoxyethyl 5-methyl cytidine 3'-phosphodiester
  modified_base 6: mod_base = OTHER; note = 2'-O-methoxyethyl thymidine 3'-phosphodiester
  modified_base 7: mod_base = OTHER; note = 2'-deoxyguanosine 3'-phosphorothioate
  modified_base 8..10: mod_base = OTHER; note = 2'-deoxythymidine 3'-phosphorothioate
  modified_base 11: mod_base = OTHER; note = 5-methyl 2'-deoxycytidine 3'-phosphorothioate
  modified_base 12: mod_base = OTHER; note = 2'-deoxyguanosine 3'-phosphorothioate
  modified_base 13: mod_base = OTHER; note = 2'-deoxyadenosine 3'-phosphorothioate
  modified_base 14..15: mod_base = OTHER; note = 5-methyl 2'-deoxycytidine 3'-phosphorothioate
  modified_base 16: mod_base = OTHER; note = 2'-deoxythymidine 3'-phosphorothioate
  modified_base 17: mod_base = OTHER; note = 2'-O-methoxyethyl 5-methyl cytidine 3'-phosphodiester
  modified_base 18: mod_base = OTHER; note = 2'-O-methoxyethyl thymidine 3'-phosphorothioate
  modified_base 19: mod_base = OTHER; note = 2'-O-methoxyethyl guanosine 3'-phosphorothioate
  modified_base 20: mod_base = OTHER; note = 2'-O-methoxyethyl adenosine
gttactgtttcgacctctga

SEQ ID NO: 3346 - DNA, 20 bp, synthetic construct
  source 1..20: mol_type = other DNA
  modified_base 1: mod_base = OTHER; note = 2'-O-methoxyethyl 5-methyl cytidine 3'-phosphorothioate
  modified_base 2: mod_base = OTHER; note = 2'-O-methoxyethyl thymidine 3'-phosphodiester
  modified_base 3..4: mod_base = OTHER; note = 2'-O-methoxyethyl guanosine 3'-phosphodiester
  modified_base 5: mod_base = OTHER; note = 2'-O-methoxyethyl adenosine 3'-phosphodiester
  modified_base 6: mod_base = OTHER; note = 2'-O-methoxyethyl thymidine 3'-phosphodiester
  modified_base 7: mod_base = OTHER; note = 2'-deoxythymidine 3'-phosphorothioate
  modified_base 8: mod_base = OTHER; note = 5-methyl 2'-deoxycytidine 3'-phosphorothioate
  modified_base 9: mod_base = OTHER; note = 2'-deoxythymidine 3'-phosphorothioate
  modified_base 10: mod_base = OTHER; note = 2'-deoxyguanosine 3'-phosphorothioate
  modified_base 11: mod_base = OTHER; note = 2'-deoxythymidine 3'-phosphorothioate
  modified_base 12: mod_base = OTHER; note = 2'-deoxyadenosine 3'-phosphorothioate
  modified_base 13: mod_base = OTHER; note = 5-methyl 2'-deoxycytidine 3'-phosphorothioate
  modified_base 14..16: mod_base = OTHER; note = 2'-deoxythymidine 3'-phosphorothioate
  modified_base 17: mod_base = OTHER; note = 2'-O-methoxyethyl thymidine 3'-phosphodiester
  modified_base 18: mod_base = OTHER; note = 2'-O-methoxyethyl 5-methyl cytidine 3'-phosphorothioate
  modified_base 19: mod_base = OTHER; note = 2'-O-methoxyethyl thymidine 3'-phosphorothioate
  modified_base 20: mod_base = OTHER; note = 2'-O-methoxyethyl 5-methyl cytidine
ctggattctgtacttttctc

SEQ ID NO: 3347 - DNA, 20 bp, synthetic construct
  source 1..20: mol_type = other DNA
  modified_base 1: mod_base = OTHER; note = 2'-O-methoxyethyl 5-methyl cytidine 3'-phosphorothioate
  modified_base 2: mod_base = OTHER; note = 2'-O-methoxyethyl thymidine 3'-phosphodiester
  modified_base 3: mod_base = OTHER; note = 2'-O-methoxyethyl 5-methyl cytidine 3'-phosphodiester
  modified_base 4: mod_base = OTHER; note = 2'-O-methoxyethyl thymidine 3'-phosphodiester
  modified_base 5..6: mod_base = OTHER; note = 2'-O-methoxyethyl 5-methyl cytidine 3'-phosphodiester
  modified_base 7: mod_base = OTHER; note = 2'-deoxyadenosine 3'-phosphorothioate
  modified_base 8..9: mod_base = OTHER; note = 2'-deoxythymidine 3'-phosphorothioate
  modified_base 10: mod_base = OTHER; note = 2'-deoxyadenosine 3'-phosphorothioate
  modified_base 11..13: mod_base = OTHER; note = 2'-deoxythymidine 3'-phosphorothioate
  modified_base 14: mod_base = OTHER; note = 5-methyl 2'-deoxycytidine 3'-phosphorothioate
  modified_base 15..16: mod_base = OTHER; note = 2'-deoxythymidine 3'-phosphorothioate
  modified_base 17: mod_base = OTHER; note = 2'-O-methoxyethyl 5-methyl cytidine 3'-phosphodiester
  modified_base 18: mod_base = OTHER; note = 2'-O-methoxyethyl adenosine 3'-phosphorothioate
  modified_base 19: mod_base = OTHER; note = 2'-O-methoxyethyl 5-methyl cytidine 3'-phosphorothioate
  modified_base 20: mod_base = OTHER; note = 2'-O-methoxyethyl guanosine
ctctccattatttcttcacg

SEQ ID NO: 3348 - DNA, 20 bp, synthetic construct
  source 1..20: mol_type = other DNA
  modified_base 1: mod_base = OTHER; note = 2'-O-methoxyethyl 5-methyl cytidine 3'-phosphorothioate
  modified_base 2: mod_base = OTHER; note = 2'-O-methoxyethyl thymidine 3'-phosphodiester
  modified_base 3: mod_base = OTHER; note = 2'-O-methoxyethyl guanosine 3'-phosphodiester
  modified_base 4: mod_base = OTHER; note = 2'-O-methoxyethyl 5-methyl cytidine 3'-phosphodiester
  modified_base 5: mod_base = OTHER; note = 2'-O-methoxyethyl thymidine 3'-phosphodiester
  modified_base 6: mod_base = OTHER; note = 2'-O-methoxyethyl adenosine 3'-phosphodiester
  modified_base 7: mod_base = OTHER; note = 2'-deoxyadenosine 3'-phosphorothioate
  modified_base 8: mod_base = OTHER; note = 5-methyl 2'-deoxycytidine 3'-phosphorothioate
  modified_base 9: mod_base = OTHER; note = 2'-deoxythymidine 3'-phosphorothioate
  modified_base 10..11: mod_base = OTHER; note = 2'-deoxyguanosine 3'-phosphorothioate
  modified_base 12..14: mod_base = OTHER; note = 2'-deoxythymidine 3'-phosphorothioate
  modified_base 15: mod_base = OTHER; note = 2'-deoxyguanosine 3'-phosphorothioate
  modified_base 16: mod_base = OTHER; note = 5-methyl 2'-deoxycytidine 3'-phosphorothioate
  modified_base 17: mod_base = OTHER; note = 2'-O-methoxyethyl 5-methyl cytidine 3'-phosphodiester
  modified_base 18: mod_base = OTHER; note = 2'-O-methoxyethyl 5-methyl cytidine 3'-phosphorothioate
  modified_base 19: mod_base = OTHER; note = 2'-O-methoxyethyl thymidine 3'-phosphorothioate
  modified_base 20: mod_base = OTHER; note = 2'-O-methoxyethyl thymidine
ctgctaactggtttgccctt

SEQ ID NO: 3349 - DNA, 20 bp, synthetic construct
  source 1..20: mol_type = other DNA
  modified_base 1: mod_base = OTHER; note = 2'-O-methoxyethyl adenosine 3'-phosphorothioate
  modified_base 2: mod_base = OTHER; note = 2'-O-methoxyethyl 5-methyl cytidine 3'-phosphodiester
  modified_base 3..4: mod_base = OTHER; note = 2'-O-methoxyethyl thymidine 3'-phosphodiester
  modified_base 5: mod_base = OTHER; note = 2'-O-methoxyethyl 5-methyl cytidine 3'-phosphodiester
  modified_base 6: mod_base = OTHER; note = 2'-O-methoxyethyl thymidine 3'-phosphodiester
  modified_base 7: mod_base = OTHER; note = 5-methyl 2'-deoxycytidine 3'-phosphorothioate
  modified_base 8: mod_base = OTHER; note = 2'-deoxythymidine 3'-phosphorothioate
  modified_base 9: mod_base = OTHER; note = 2'-deoxyadenosine 3'-phosphorothioate
  modified_base 10..12: mod_base = OTHER; note = 2'-deoxythymidine 3'-phosphorothioate
  modified_base 13: mod_base = OTHER; note = 5-methyl 2'-deoxycytidine 3'-phosphorothioate
  modified_base 14..16: mod_base = OTHER; note = 2'-deoxythymidine 3'-phosphorothioate
  modified_base 17: mod_base = OTHER; note = 2'-O-methoxyethyl guanosine 3'-phosphodiester
  modified_base 18: mod_base = OTHER; note = 2'-O-methoxyethyl thymidine 3'-phosphorothioate
  modified_base 19: mod_base = OTHER; note = 2'-O-methoxyethyl 5-methyl cytidine 3'-phosphorothioate
  modified_base 20: mod_base = OTHER; note = 2'-O-methoxyethyl 5-methyl cytidine
acttctctatttctttgtcc

SEQ ID NO: 3350 - DNA, 20 bp, synthetic construct
  source 1..20: mol_type = other DNA
  modified_base 1: mod_base = OTHER; note = 2'-O-methoxyethyl guanosine 3'-phosphorothioate
  modified_base 2: mod_base = OTHER; note = 2'-O-methoxyethyl thymidine 3'-phosphodiester
  modified_base 3: mod_base = OTHER; note = 2'-O-methoxyethyl guanosine 3'-phosphodiester
  modified_base 4: mod_base = OTHER; note = 2'-O-methoxyethyl adenosine 3'-phosphodiester
  modified_base 5: mod_base = OTHER; note = 2'-O-methoxyethyl thymidine 3'-phosphodiester
  modified_base 6: mod_base = OTHER; note = 2'-O-methoxyethyl guanosine 3'-phosphodiester
  modified_base 7..9: mod_base = OTHER; note = 2'-deoxythymidine 3'-phosphorothioate
  modified_base 10: mod_base = OTHER; note = 5-methyl 2'-deoxycytidine 3'-phosphorothioate
  modified_base 11: mod_base = OTHER; note = 2'-deoxyadenosine 3'-phosphorothioate
  modified_base 12..13: mod_base = OTHER; note = 2'-deoxythymidine 3'-phosphorothioate
  modified_base 14..16: mod_base = OTHER; note = 2'-deoxyguanosine 3'-phosphorothioate
  modified_base 17: mod_base = OTHER; note = 2'-O-methoxyethyl thymidine 3'-phosphodiester
  modified_base 18..19: mod_base = OTHER; note = 2'-O-methoxyethyl thymidine 3'-phosphorothioate
  modified_base 20: mod_base = OTHER; note = 2'-O-methoxyethyl adenosine
gtgatgtttcattgggttta

SEQ ID NO: 3351 - DNA, 20 bp, synthetic construct
  source 1..20: mol_type = other DNA
  modified_base 1: mod_base = OTHER; note = 2'-O-methoxyethyl guanosine 3'-phosphorothioate
  modified_base 2: mod_base = OTHER; note = 2'-O-methoxyethyl thymidine 3'-phosphodiester
  modified_base 3: mod_base = OTHER; note = 2'-O-methoxyethyl adenosine 3'-phosphodiester
  modified_base 4: mod_base = OTHER; note = 2'-O-methoxyethyl thymidine 3'-phosphodiester
  modified_base 5: mod_base = OTHER; note = 2'-O-methoxyethyl guanosine 3'-phosphodiester
  modified_base 6..8: mod_base = OTHER; note = 2'-deoxythymidine 3'-phosphorothioate
  modified_base 9: mod_base = OTHER; note = 2'-deoxyguanosine 3'-phosphorothioate
  modified_base 10: mod_base = OTHER; note = 2'-deoxythymidine 3'-phosphorothioate
  modified_base 11: mod_base = OTHER; note = 5-methyl 2'-deoxycytidine 3'-phosphorothioate
  modified_base 12: mod_base = OTHER; note = 2'-deoxythymidine 3'-phosphorothioate
  modified_base 13: mod_base = OTHER; note = 2'-deoxyguanosine 3'-phosphorothioate
  modified_base 14: mod_base = OTHER; note = 2'-deoxythymidine 3'-phosphorothioate
  modified_base 15: mod_base = OTHER; note = 5-methyl 2'-deoxycytidine 3'-phosphorothioate
  modified_base 16..17: mod_base = OTHER; note = 2'-O-methoxyethyl thymidine 3'-phosphodiester
  modified_base 18: mod_base = OTHER; note = 2'-O-methoxyethyl adenosine 3'-phosphorothioate
  modified_base 19: mod_base = OTHER; note = 2'-O-methoxyethyl thymidine 3'-phosphorothioate
  modified_base 20: mod_base = OTHER; note = 2'-O-methoxyethyl thymidine
gtatgtttgtctgtcttatt

SEQ ID NO: 3352 - DNA, 20 bp, synthetic construct
  source 1..20: mol_type = other DNA
  modified_base 1: mod_base = OTHER; note = 2'-O-methoxyethyl thymidine 3'-phosphorothioate
  modified_base 2: mod_base = OTHER; note = 2'-O-methoxyethyl 5-methyl cytidine 3'-phosphodiester
  modified_base 3: mod_base = OTHER; note = 2'-O-methoxyethyl guanosine 3'-phosphodiester
  modified_base 4: mod_base = OTHER; note = 2'-O-methoxyethyl thymidine 3'-phosphodiester
  modified_base 5: mod_base = OTHER; note = 2'-O-methoxyethyl adenosine 3'-phosphodiester
  modified_base 6: mod_base = OTHER; note = 2'-deoxythymidine 3'-phosphorothioate
  modified_base 7: mod_base = OTHER; note = 2'-deoxyguanosine 3'-phosphorothioate
  modified_base 8..10: mod_base = OTHER; note = 2'-deoxythymidine 3'-phosphorothioate
  modified_base 11: mod_base = OTHER; note = 2'-deoxyguanosine 3'-phosphorothioate
  modified_base 12: mod_base = OTHER; note = 2'-deoxythymidine 3'-phosphorothioate
  modified_base 13: mod_base = OTHER; note = 5-methyl 2'-deoxycytidine 3'-phosphorothioate
  modified_base 14: mod_base = OTHER; note = 2'-deoxythymidine 3'-phosphorothioate
  modified_base 15: mod_base = OTHER; note = 2'-deoxyguanosine 3'-phosphorothioate
  modified_base 16: mod_base = OTHER; note = 2'-O-methoxyethyl thymidine 3'-phosphodiester
  modified_base 17: mod_base = OTHER; note = 2'-O-methoxyethyl 5-methyl cytidine 3'-phosphodiester
  modified_base 18..19: mod_base = OTHER; note = 2'-O-methoxyethyl thymidine 3'-phosphorothioate
  modified_base 20: mod_base = OTHER; note = 2'-O-methoxyethyl adenosine
tcgtatgtttgtctgtctta

SEQ ID NO: 3353 - DNA, 20 bp, synthetic construct
  source 1..20: mol_type = other DNA
  modified_base 1: mod_base = OTHER; note = 2'-O-methoxyethyl adenosine 3'-phosphorothioate
  modified_base 2: mod_base = OTHER; note = 2'-O-methoxyethyl 5-methyl cytidine 3'-phosphodiester
  modified_base 3..4: mod_base = OTHER; note = 2'-O-methoxyethyl thymidine 3'-phosphodiester
  modified_base 5: mod_base = OTHER; note = 2'-O-methoxyethyl 5-methyl cytidine 3'-phosphodiester
  modified_base 6: mod_base = OTHER; note = 2'-deoxyadenosine 3'-phosphorothioate
  modified_base 7: mod_base = OTHER; note = 5-methyl 2'-deoxycytidine 3'-phosphorothioate
  modified_base 8: mod_base = OTHER; note = 2'-deoxyadenosine 3'-phosphorothioate
  modified_base 9..11: mod_base = OTHER; note = 2'-deoxythymidine 3'-phosphorothioate
  modified_base 12..13: mod_base = OTHER; note = 2'-deoxyguanosine 3'-phosphorothioate
  modified_base 14: mod_base = OTHER; note = 2'-deoxyadenosine 3'-phosphorothioate
  modified_base 16: mod_base = OTHER; note = 2'-deoxyguanosine 3'-phosphorothioate
  modified_base 16..17: mod_base = OTHER; note = 2'-O-methoxyethyl 5-methyl cytidine 3'-phosphodiester
  modified_base 18: mod_base = OTHER; note = 2'-O-methoxyethyl 5-methyl cytidine 3'-phosphorothioate
  modified_base 19: mod_base = OTHER; note = 2'-O-methoxyethyl thymidine 3'-phosphorothioate
  modified_base 20: mod_base = OTHER; note = 2'-O-methoxyethyl adenosine
acttcacatttggagcccta

SEQ ID NO: 3354 - DNA, 20 bp, synthetic construct
  source 1..20: mol_type = other DNA
  modified_base 1: mod_base = OTHER; note = 2'-O-methoxyethyl thymidine 3'-phosphorothioate
  modified_base 2: mod_base = OTHER; note = 2'-O-methoxyethyl adenosine 3'-phosphodiester
  modified_base 3: mod_base = OTHER; note = 2'-O-methoxyethyl 5-methyl cytidine 3'-phosphodiester
  modified_base 4..5: mod_base = OTHER; note = 2'-O-methoxyethyl thymidine 3'-phosphodiester
  modified_base 6: mod_base = OTHER; note = 5-methyl 2'-deoxycytidine 3'-phosphorothioate
  modified_base 7: mod_base = OTHER; note = 2'-deoxyadenosine 3'-phosphorothioate
  modified_base 8: mod_base = OTHER; note = 5-methyl 2'-deoxycytidine 3'-phosphorothioate
  modified_base 9: mod_base = OTHER; note = 2'-deoxyadenosine 3'-phosphorothioate
  modified_base 10..12: mod_base = OTHER; note = 2'-deoxythymidine 3'-phosphorothioate
  modified_base 13..14: mod_base = OTHER; note = 2'-deoxyguanosine 3'-phosphorothioate
  modified_base 15: mod_base = OTHER; note = 2'-deoxyadenosine 3'-phosphorothioate
  modified_base 16: mod_base = OTHER; note = 2'-O-methoxyethyl guanosine 3'-phosphodiester
  modified_base 17: mod_base = OTHER; note = 2'-O-methoxyethyl 5-methyl cytidine 3'-phosphodiester
  modified_base 18..19: mod_base = OTHER; note = 2'-O-methoxyethyl 5-methyl cytidine 3'-phosphorothioate
  modified_base 20: mod_base = OTHER; note = 2'-O-methoxyethyl thymidine
tacttcacatttggagccct

SEQ ID NO: 3355 - DNA, 20 bp, synthetic construct
  source 1..20: mol_type = other DNA
  modified_base 1: mod_base = OTHER; note = 2'-O-methoxyethyl guanosine 3'-phosphorothioate
  modified_base 2: mod_base = OTHER; note = 2'-O-methoxyethyl thymidine 3'-phosphodiester
  modified_base 3: mod_base = OTHER; note = 2'-O-methoxyethyl adenosine 3'-phosphodiester
  modified_base 4: mod_base = OTHER; note = 2'-O-methoxyethyl 5-methyl cytidine 3'-phosphodiester
  modified_base 5: mod_base = OTHER; note = 2'-O-methoxyethyl thymidine 3'-phosphodiester
  modified_base 6: mod_base = OTHER; note = 2'-deoxythymidine 3'-phosphorothioate
  modified_base 7: mod_base = OTHER; note = 5-methyl 2'-deoxycytidine 3'-phosphorothioate
  modified_base 8: mod_base = OTHER; note = 2'-deoxyadenosine 3'-phosphorothioate
  modified_base 9: mod_base = OTHER; note = 5-methyl 2'-deoxycytidine 3'-phosphorothioate
  modified_base 10: mod_base = OTHER; note = 2'-deoxyadenosine 3'-phosphorothioate
  modified_base 11..13: mod_base = OTHER; note = 2'-deoxythymidine 3'-phosphorothioate
  modified_base 14..15: mod_base = OTHER; note = 2'-deoxyguanosine 3'-phosphorothioate
  modified_base 16: mod_base = OTHER; note = 2'-O-methoxyethyl adenosine 3'-phosphodiester
  modified_base 17: mod_base = OTHER; note = 2'-O-methoxyethyl guanosine 3'-phosphodiester
  modified_base 18..19: mod_base = OTHER; note = 2'-O-methoxyethyl 5-methyl cytidine 3'-phosphorothioate
  modified_base 20: mod_base = OTHER; note = 2'-O-methoxyethyl 5-methyl cytidine
gtacttcacatttggagccc

SEQ ID NO: 3356 - DNA, 20 bp, synthetic construct
  source 1..20: mol_type = other DNA
  modified_base 1: mod_base = OTHER; note = 2'-O-methoxyethyl adenosine 3'-phosphorothioate
  modified_base 2..3: mod_base = OTHER; note = 2'-O-methoxyethyl thymidine 3'-phosphodiester
  modified_base 4: mod_base = OTHER; note = 2'-O-methoxyethyl 5-methyl cytidine 3'-phosphodiester
  modified_base 5: mod_base = OTHER; note = 2'-O-methoxyethyl thymidine 3'-phosphodiester
  modified_base 6: mod_base = OTHER; note = 2'-deoxyguanosine 3'-phosphorothioate
  modified_base 7: mod_base = OTHER; note = 2'-deoxythymidine 3'-phosphorothioate
  modified_base 8: mod_base = OTHER; note = 2'-deoxyadenosine 3'-phosphorothioate
  modified_base 9: mod_base = OTHER; note = 5-methyl 2'-deoxycytidine 3'-phosphorothioate
  modified_base 10..13: mod_base = OTHER; note = 2'-deoxythymidine 3'-phosphorothioate
  modified_base 14: mod_base = OTHER; note = 5-methyl 2'-deoxycytidine 3'-phosphorothioate
  modified_base 15: mod_base = OTHER; note = 2'-deoxythymidine 3'-phosphorothioate
  modified_base 16: mod_base = OTHER; note = 2'-O-methoxyethyl 5-methyl cytidine 3'-phosphodiester
  modified_base 17: mod_base = OTHER; note = 2'-O-methoxyethyl adenosine 3'-phosphodiester
  modified_base 18: mod_base = OTHER; note = 2'-O-methoxyethyl thymidine 3'-phosphorothioate
  modified_base 19: mod_base = OTHER; note = 2'-O-methoxyethyl guanosine 3'-phosphorothioate
  modified_base 20: mod_base = OTHER; note = 2'-O-methoxyethyl thymidine
attctgtacttttctcatgt

SEQ ID NO: 3357 - DNA, 20 bp, synthetic construct
  source 1..20: mol_type = other DNA
  modified_base 1: mod_base = OTHER; note = 2'-O-methoxyethyl guanosine 3'-phosphorothioate
  modified_base 2..3: mod_base = OTHER; note = 2'-O-methoxyethyl thymidine 3'-phosphodiester
  modified_base 4: mod_base = OTHER; note = 2'-O-methoxyethyl adenosine 3'-phosphodiester
  modified_base 5: mod_base = OTHER; note = 2'-O-methoxyethyl 5-methyl cytidine 3'-phosphodiester
  modified_base 6: mod_base = OTHER; note = 2'-deoxythymidine 3'-phosphorothioate
  modified_base 7: mod_base = OTHER; note = 2'-deoxyguanosine 3'-phosphorothioate
  modified_base 8..10: mod_base = OTHER; note = 2'-deoxythymidine 3'-phosphorothioate
  modified_base 11: mod_base = OTHER; note = 5-methyl 2'-deoxycytidine 3'-phosphorothioate
  modified_base 12: mod_base = OTHER; note = 2'-deoxyguanosine 3'-phosphorothioate
  modified_base 13: mod_base = OTHER; note = 2'-deoxyadenosine 3'-phosphorothioate
  modified_base 14..15: mod_base = OTHER; note = 5-methyl 2'-deoxycytidine 3'-phosphorothioate
  modified_base 16: mod_base = OTHER; note = 2'-O-methoxyethyl thymidine 3'-phosphodiester
  modified_base 17: mod_base = OTHER; note = 2'-O-methoxyethyl 5-methyl cytidine 3'-phosphodiester
  modified_base 18: mod_base = OTHER; note = 2'-O-methoxyethyl thymidine 3'-phosphorothioate
  modified_base 19: mod_base = OTHER; note = 2'-O-methoxyethyl guanosine 3'-phosphorothioate
  modified_base 20: mod_base = OTHER; note = 2'-O-methoxyethyl adenosine
gttactgtttcgacctctga

SEQ ID NO: 3358 - DNA, 20 bp, synthetic construct
  source 1..20: mol_type = other DNA
  modified_base 1: mod_base = OTHER; note = 2'-O-methoxyethyl adenosine 3'-phosphorothioate
  modified_base 2: mod_base = OTHER; note = 2'-O-methoxyethyl 5-methyl cytidine 3'-phosphodiester
  modified_base 3: mod_base = OTHER; note = 2'-O-methoxyethyl thymidine 3'-phosphodiester
  modified_base 4..5: mod_base = OTHER; note = 2'-O-methoxyethyl guanosine 3'-phosphodiester
  modified_base 6: mod_base = OTHER; note = 2'-deoxyadenosine 3'-phosphorothioate
  modified_base 7..8: mod_base = OTHER; note = 2'-deoxythymidine 3'-phosphorothioate
  modified_base 9: mod_base = OTHER; note = 5-methyl 2'-deoxycytidine 3'-phosphorothioate
  modified_base 10: mod_base = OTHER; note = 2'-deoxythymidine 3'-phosphorothioate
  modified_base 11: mod_base = OTHER; note = 2'-deoxyguanosine 3'-phosphorothioate
  modified_base 12: mod_base = OTHER; note = 2'-deoxythymidine 3'-phosphorothioate
  modified_base 13: mod_base = OTHER; note = 2'-deoxyadenosine 3'-phosphorothioate
  modified_base 14: mod_base = OTHER; note = 5-methyl 2'-deoxycytidine 3'-phosphorothioate
  modified_base 15: mod_base = OTHER; note = 2'-deoxythymidine 3'-phosphorothioate
  modified_base 16..17: mod_base = OTHER; note = 2'-O-methoxyethyl thymidine 3'-phosphodiester
  modified_base 18: mod_base = OTHER; note = 2'-O-methoxyethyl thymidine 3'-phosphorothioate
  modified_base 19: mod_base = OTHER; note = 2'-O-methoxyethyl 5-methyl cytidine 3'-phosphorothioate
  modified_base 20: mod_base = OTHER; note = 2'-O-methoxyethyl thymidine
actggattctgtacttttct

SEQ ID NO: 3359 - DNA, 20 bp, synthetic construct
  source 1..20: mol_type = other DNA
  modified_base 1: mod_base = OTHER; note = 2'-O-methoxyethyl adenosine 3'-phosphorothioate
  modified_base 2: mod_base = OTHER; note = 2'-O-methoxyethyl adenosine 3'-phosphodiester
  modified_base 3: mod_base = OTHER; note = 2'-O-methoxyethyl 5-methyl cytidine 3'-phosphodiester
  modified_base 4: mod_base = OTHER; note = 2'-O-methoxyethyl thymidine 3'-phosphodiester
  modified_base 5: mod_base = OTHER; note = 2'-O-methoxyethyl guanosine 3'-phosphodiester
  modified_base 6: mod_base = OTHER; note = 2'-deoxyguanosine 3'-phosphorothioate
  modified_base 7: mod_base = OTHER; note = 2'-deoxyadenosine 3'-phosphorothioate
  modified_base 8..9: mod_base = OTHER; note = 2'-deoxythymidine 3'-phosphorothioate
  modified_base 10: mod_base = OTHER; note = 5-methyl 2'-deoxycytidine 3'-phosphorothioate
  modified_base 11: mod_base = OTHER; note = 2'-deoxythymidine 3'-phosphorothioate
  modified_base 12: mod_base = OTHER; note = 2'-deoxyguanosine 3'-phosphorothioate
  modified_base 13: mod_base = OTHER; note = 2'-deoxythymidine 3'-phosphorothioate
  modified_base 14: mod_base = OTHER; note = 2'-deoxyadenosine 3'-phosphorothioate
  modified_base 15: mod_base = OTHER; note = 5-methyl 2'-deoxycytidine 3'-phosphorothioate
  modified_base 16..17: mod_base = OTHER; note = 2'-O-methoxyethyl thymidine 3'-phosphodiester
  modified_base 18..19: mod_base = OTHER; note = 2'-O-methoxyethyl thymidine 3'-phosphorothioate
  modified_base 20: mod_base = OTHER; note = 2'-O-methoxyethyl 5-methyl cytidine
aactggattctgtacttttc

SEQ ID NO: 3360 - DNA, 20 bp, synthetic construct
  source 1..20: mol_type = other DNA
  modified_base 1: mod_base = OTHER; note = 2'-O-methoxyethyl guanosine 3'-phosphorothioate
  modified_base 2..3: mod_base = OTHER; note = 2'-O-methoxyethyl adenosine 3'-phosphodiester
  modified_base 4: mod_base = OTHER; note = 2'-O-methoxyethyl 5-methyl cytidine 3'-phosphodiester
  modified_base 5: mod_base = OTHER; note = 2'-O-methoxyethyl thymidine 3'-phosphodiester
  modified_base 6..7: mod_base = OTHER; note = 2'-deoxyguanosine 3'-phosphorothioate
  modified_base 8: mod_base = OTHER; note = 2'-deoxyadenosine 3'-phosphorothioate
  modified_base 9..10: mod_base = OTHER; note = 2'-deoxythymidine 3'-phosphorothioate
  modified_base 11: mod_base = OTHER; note = 5-methyl 2'-deoxycytidine 3'-phosphorothioate
  modified_base 12: mod_base = OTHER; note = 2'-deoxythymidine 3'-phosphorothioate
  modified_base 13: mod_base = OTHER; note = 2'-deoxyguanosine 3'-phosphorothioate
  modified_base 14: mod_base = OTHER; note = 2'-deoxythymidine 3'-phosphorothioate
  modified_base 15: mod_base = OTHER; note = 2'-deoxyadenosine 3'-phosphorothioate
  modified_base 16: mod_base = OTHER; note = 2'-O-methoxyethyl 5-methyl cytidine 3'-phosphodiester
  modified_base 17: mod_base = OTHER; note = 2'-O-methoxyethyl thymidine 3'-phosphodiester
  modified_base 18..19: mod_base = OTHER; note = 2'-O-methoxyethyl thymidine 3'-phosphorothioate
  modified_base 20: mod_base = OTHER; note = 2'-O-methoxyethyl thymidine
gaactggattctgtactttt

SEQ ID NO: 3361 - DNA, 20 bp, synthetic construct
  source 1..20: mol_type = other DNA
  modified_base 1: mod_base = OTHER; note = 2'-O-methoxyethyl thymidine 3'-phosphorothioate
  modified_base 2..3: mod_base = OTHER; note = 2'-O-methoxyethyl 5-methyl cytidine 3'-phosphodiester
  modified_base 4: mod_base = OTHER; note = 2'-O-methoxyethyl adenosine 3'-phosphodiester
  modified_base 5: mod_base = OTHER; note = 2'-O-methoxyethyl thymidine 3'-phosphodiester
  modified_base 6: mod_base = OTHER; note = 2'-deoxythymidine 3'-phosphorothioate
  modified_base 7: mod_base = OTHER; note = 2'-deoxyadenosine 3'-phosphorothioate
  modified_base 8..10: mod_base = OTHER; note = 2'-deoxythymidine 3'-phosphorothioate
  modified_base 11: mod_base = OTHER; note = 5-methyl 2'-deoxycytidine 3'-phosphorothioate
  modified_base 12..13: mod_base = OTHER; note = 2'-deoxythymidine 3'-phosphorothioate
  modified_base 14: mod_base = OTHER; note = 5-methyl 2'-deoxycytidine 3'-phosphorothioate
  modified_base 15: mod_base = OTHER; note = 2'-deoxyadenosine 3'-phosphorothioate
  modified_base 16: mod_base = OTHER; note = 2'-O-methoxyethyl 5-methyl cytidine 3'-phosphodiester
  modified_base 17: mod_base = OTHER; note = 2'-O-methoxyethyl guanosine 3'-phosphodiester
  modified_base 18..19: mod_base = OTHER; note = 2'-O-methoxyethyl thymidine 3'-phosphorothioate
  modified_base 20: mod_base = OTHER; note = 2'-O-methoxyethyl thymidine
tccattatttcttcacgttt

SEQ ID NO: 3362 - DNA, 20 bp, synthetic construct
  source 1..20: mol_type = other DNA
  modified_base 1: mod_base = OTHER; note = 2'-O-methoxyethyl 5-methyl cytidine 3'-phosphorothioate
  modified_base 2: mod_base = OTHER; note = 2'-O-methoxyethyl thymidine 3'-phosphodiester
  modified_base 3..4: mod_base = OTHER; note = 2'-O-methoxyethyl 5-methyl cytidine 3'-phosphodiester
  modified_base 5: mod_base = OTHER; note = 2'-O-methoxyethyl adenosine 3'-phosphodiester
  modified_base 6..7: mod_base = OTHER; note = 2'-deoxythymidine 3'-phosphorothioate
  modified_base 8: mod_base = OTHER; note = 2'-deoxyadenosine 3'-phosphorothioate
  modified_base 9..11: mod_base = OTHER; note = 2'-deoxythymidine 3'-phosphorothioate
  modified_base 12: mod_base = OTHER; note = 5-methyl 2'-deoxycytidine 3'-phosphorothioate
  modified_base 13..14: mod_base = OTHER; note = 2'-deoxythymidine 3'-phosphorothioate
  modified_base 15: mod_base = OTHER; note = 5-methyl 2'-deoxycytidine 3'-phosphorothioate
  modified_base 16: mod_base = OTHER; note = 2'-O-methoxyethyl adenosine 3'-phosphodiester
  modified_base 17: mod_base = OTHER; note = 2'-O-methoxyethyl 5-methyl cytidine 3'-phosphodiester
  modified_base 18: mod_base = OTHER; note = 2'-O-methoxyethyl guanosine 3'-phosphorothioate
  modified_base 19: mod_base = OTHER; note = 2'-O-methoxyethyl thymidine 3'-phosphorothioate
  modified_base 20: mod_base = OTHER; note = 2'-O-methoxyethyl thymidine
ctccattatttcttcacgtt

SEQ ID NO: 3363 - DNA, 20 bp, synthetic construct
  source 1..20: mol_type = other DNA
  modified_base 1: mod_base = OTHER; note = 2'-O-methoxyethyl thymidine 3'-phosphorothioate
  modified_base 2: mod_base = OTHER; note = 2'-O-methoxyethyl 5-methyl cytidine 3'-phosphodiester
  modified_base 3: mod_base = OTHER; note = 2'-O-methoxyethyl thymidine 3'-phosphodiester
  modified_base 4..5: mod_base = OTHER; note = 2'-O-methoxyethyl 5-methyl cytidine 3'-phosphodiester
  modified_base 6: mod_base = OTHER; note = 2'-deoxyadenosine 3'-phosphorothioate
  modified_base 7..8: mod_base = OTHER; note = 2'-deoxythymidine 3'-phosphorothioate
  modified_base 9: mod_base = OTHER; note = 2'-deoxyadenosine 3'-phosphorothioate
  modified_base 10..12: mod_base = OTHER; note = 2'-deoxythymidine 3'-phosphorothioate
  modified_base 13: mod_base = OTHER; note = 5-methyl 2'-deoxycytidine 3'-phosphorothioate
  modified_base 14..15: mod_base = OTHER; note = 2'-deoxythymidine 3'-phosphorothioate
  modified_base 16: mod_base = OTHER; note = 2'-O-methoxyethyl 5-methyl cytidine 3'-phosphodiester
  modified_base 17: mod_base = OTHER; note = 2'-O-methoxyethyl adenosine 3'-phosphodiester
  modified_base 18: mod_base = OTHER; note = 2'-O-methoxyethyl 5-methyl cytidine 3'-phosphorothioate
  modified_base 19: mod_base = OTHER; note = 2'-O-methoxyethyl guanosine 3'-phosphorothioate
  modified_base 20: mod_base = OTHER; note = 2'-O-methoxyethyl thymidine
tctccattatttcttcacgt

SEQ ID NO: 3364 - DNA, 20 bp, synthetic construct
  source 1..20: mol_type = other DNA
  modified_base 1: mod_base = OTHER; note = 2'-O-methoxyethyl 5-methyl cytidine 3'-phosphorothioate
  modified_base 2: mod_base = OTHER; note = 2'-O-methoxyethyl thymidine 3'-phosphodiester
  modified_base 3: mod_base = OTHER; note = 2'-O-methoxyethyl 5-methyl cytidine 3'-phosphodiester
  modified_base 4: mod_base = OTHER; note = 2'-O-methoxyethyl thymidine 3'-phosphodiester
  modified_base 5: mod_base = OTHER; note = 2'-O-methoxyethyl adenosine 3'-phosphodiester
  modified_base 6..8: mod_base = OTHER; note = 2'-deoxythymidine 3'-phosphorothioate
  modified_base 9: mod_base = OTHER; note = 5-methyl 2'-deoxycytidine 3'-phosphorothioate
  modified_base 10..12: mod_base = OTHER; note = 2'-deoxythymidine 3'-phosphorothioate
  modified_base 13: mod_base = OTHER; note = 2'-deoxyguanosine 3'-phosphorothioate
  modified_base 14: mod_base = OTHER; note = 2'-deoxythymidine 3'-phosphorothioate
  modified_base 15: mod_base = OTHER; note = 5-methyl 2'-deoxycytidine 3'-phosphorothioate
  modified_base 16: mod_base = OTHER; note = 2'-O-methoxyethyl 5-methyl cytidine 3'-phosphodiester
  modified_base 17: mod_base = OTHER; note = 2'-O-methoxyethyl adenosine 3'-phosphodiester
  modified_base 18..19: mod_base = OTHER; note = 2'-O-methoxyethyl guanosine 3'-phosphorothioate
  modified_base 20: mod_base = OTHER; note = 2'-O-methoxyethyl adenosine
ctctatttctttgtccagga

SEQ ID NO: 3365 - DNA, 20 bp, synthetic construct
  source 1..20: mol_type = other DNA
  modified_base 1: mod_base = OTHER; note = 2'-O-methoxyethyl guanosine 3'-phosphorothioate
  modified_base 2: mod_base = OTHER; note = 2'-O-methoxyethyl thymidine 3'-phosphodiester
  modified_base 3..4: mod_base = OTHER; note = 2'-O-methoxyethyl guanosine 3'-phosphodiester
  modified_base 5: mod_base = OTHER; note = 2'-O-methoxyethyl thymidine 3'-phosphodiester
  modified_base 6: mod_base = OTHER; note = 2'-deoxyguanosine 3'-phosphorothioate
  modified_base 7: mod_base = OTHER; note = 2'-deoxythymidine 3'-phosphorothioate
  modified_base 8: mod_base = OTHER; note = 2'-deoxyguanosine 3'-phosphorothioate
  modified_base 9: mod_base = OTHER; note = 5-methyl 2'-deoxycytidine 3'-phosphorothioate
  modified_base 10: mod_base = OTHER; note = 2'-deoxyguanosine 3'-phosphorothioate
  modified_base 11: mod_base = OTHER; note = 5-methyl 2'-deoxycytidine 3'-phosphorothioate
  modified_base 12: mod_base = OTHER; note = 2'-deoxyadenosine 3'-phosphorothioate
  modified_base 13: mod_base = OTHER; note = 2'-deoxythymidine 3'-phosphorothioate
  modified_base 14: mod_base = OTHER; note = 2'-deoxyguanosine 3'-phosphorothioate
  modified_base 15: mod_base = OTHER; note = 2'-deoxythymidine 3'-phosphorothioate
  modified_base 16: mod_base = OTHER; note = 2'-O-methoxyethyl adenosine 3'-phosphodiester
  modified_base 17: mod_base = OTHER; note = 2'-O-methoxyethyl guanosine 3'-phosphodiester
  modified_base 18: mod_base = OTHER; note = 2'-O-methoxyethyl adenosine 3'-phosphorothioate
  modified_base 19: mod_base = OTHER; note = 2'-O-methoxyethyl 5-methyl cytidine 3'-phosphorothioate
  modified_base 20: mod_base = OTHER; note = 2'-O-methoxyethyl 5-methyl cytidine
gtggtgtgcgcatgtagacc

SEQ ID NO: 3366 - DNA, 20 bp, synthetic construct
  source 1..20: mol_type = other DNA
  modified_base 1: mod_base = OTHER; note = 2'-O-methoxyethyl guanosine 3'-phosphorothioate
  modified_base 2: mod_base = OTHER; note = 2'-O-methoxyethyl guanosine 3'-phosphodiester
  modified_base 3: mod_base = OTHER; note = 2'-O-methoxyethyl thymidine 3'-phosphodiester
  modified_base 4..5: mod_base = OTHER; note = 2'-O-methoxyethyl guanosine 3'-phosphodiester
  modified_base 6: mod_base = OTHER; note = 2'-deoxythymidine 3'-phosphorothioate
  modified_base 7: mod_base = OTHER; note = 2'-deoxyguanosine 3'-phosphorothioate
  modified_base 8: mod_base = OTHER; note = 2'-deoxythymidine 3'-phosphorothioate
  modified_base 9: mod_base = OTHER; note = 2'-deoxyguanosine 3'-phosphorothioate
  modified_base 10: mod_base = OTHER; note = 5-methyl 2'-deoxycytidine 3'-phosphorothioate
  modified_base 11: mod_base = OTHER; note = 2'-deoxyguanosine 3'-phosphorothioate
  modified_base 12: mod_base = OTHER; note = 5-methyl 2'-deoxycytidine 3'-phosphorothioate
  modified_base 13: mod_base = OTHER; note = 2'-deoxyadenosine 3'-phosphorothioate
  modified_base 14: mod_base = OTHER; note = 2'-deoxythymidine 3'-phosphorothioate
  modified_base 15: mod_base = OTHER; note = 2'-deoxyguanosine 3'-phosphorothioate
  modified_base 16: mod_base = OTHER; note = 2'-O-methoxyethyl thymidine 3'-phosphodiester
  modified_base 17: mod_base = OTHER; note = 2'-O-methoxyethyl adenosine 3'-phosphodiester
  modified_base 18: mod_base = OTHER; note = 2'-O-methoxyethyl guanosine 3'-phosphorothioate
  modified_base 19: mod_base = OTHER; note = 2'-O-methoxyethyl adenosine 3'-phosphorothioate
  modified_base 20: mod_base = OTHER; note = 2'-O-methoxyethyl 5-methyl cytidine
ggtggtgtgcgcatgtagac

SEQ ID NO: 3367 - DNA, 20 bp, synthetic construct
  source 1..20: mol_type = other DNA
  modified_base 1: mod_base = OTHER; note = 2'-O-methoxyethyl guanosine 3'-phosphorothioate
  modified_base 2: mod_base = OTHER; note = 2'-O-methoxyethyl thymidine 3'-phosphodiester
  modified_base 3..4: mod_base = OTHER; note = 2'-O-methoxyethyl guanosine 3'-phosphodiester
  modified_base 5: mod_base = OTHER; note = 2'-O-methoxyethyl thymidine 3'-phosphodiester
  modified_base 6..7: mod_base = OTHER; note = 2'-deoxyguanosine 3'-phosphorothioate
  modified_base 8: mod_base = OTHER; note = 2'-deoxythymidine 3'-phosphorothioate
  modified_base 9: mod_base = OTHER; note = 2'-deoxyguanosine 3'-phosphorothioate
  modified_base 10: mod_base = OTHER; note = 2'-deoxythymidine 3'-phosphorothioate
  modified_base 11: mod_base = OTHER; note = 2'-deoxyguanosine 3'-phosphorothioate
  modified_base 12: mod_base = OTHER; note = 5-methyl 2'-deoxycytidine 3'-phosphorothioate
  modified_base 13: mod_base = OTHER; note = 2'-deoxyguanosine 3'-phosphorothioate
  modified_base 14: mod_base = OTHER; note = 5-methyl 2'-deoxycytidine 3'-phosphorothioate
  modified_base 15: mod_base = OTHER; note = 2'-deoxyadenosine 3'-phosphorothioate
  modified_base 16: mod_base = OTHER; note = 2'-O-methoxyethyl thymidine 3'-phosphodiester
  modified_base 17: mod_base = OTHER; note = 2'-O-methoxyethyl guanosine 3'-phosphodiester
  modified_base 18: mod_base = OTHER; note = 2'-O-methoxyethyl thymidine 3'-phosphorothioate
  modified_base 19: mod_base = OTHER; note = 2'-O-methoxyethyl adenosine 3'-phosphorothioate
  modified_base 20: mod_base = OTHER; note = 2'-O-methoxyethyl guanosine
gtggtggtgtgcgcatgtag

SEQ ID NO: 3368 - DNA, 20 bp, synthetic construct
  source 1..20: mol_type = other DNA
  modified_base 1: mod_base = OTHER; note = 2'-O-methoxyethyl 5-methyl cytidine 3'-phosphorothioate
  modified_base 2: mod_base = OTHER; note = 2'-O-methoxyethyl guanosine 3'-phosphodiester
  modified_base 3: mod_base = OTHER; note = 2'-O-methoxyethyl thymidine 3'-phosphodiester
  modified_base 4..5: mod_base = OTHER; note = 2'-O-methoxyethyl guanosine 3'-phosphodiester
  modified_base 6: mod_base = OTHER; note = 2'-deoxythymidine 3'-phosphorothioate
  modified_base 7..8: mod_base = OTHER; note = 2'-deoxyguanosine 3'-phosphorothioate
  modified_base 9: mod_base = OTHER; note = 2'-deoxythymidine 3'-phosphorothioate
  modified_base 10: mod_base = OTHER; note = 2'-deoxyguanosine 3'-phosphorothioate
  modified_base 11: mod_base = OTHER; note = 2'-deoxythymidine 3'-phosphorothioate
  modified_base 12: mod_base = OTHER; note = 2'-deoxyguanosine 3'-phosphorothioate
  modified_base 13: mod_base = OTHER; note = 5-methyl 2'-deoxycytidine 3'-phosphorothioate
  modified_base 14: mod_base = OTHER; note = 2'-deoxyguanosine 3'-phosphorothioate
  modified_base 15: mod_base = OTHER; note = 5-methyl 2'-deoxycytidine 3'-phosphorothioate
  modified_base 16: mod_base = OTHER; note = 2'-O-methoxyethyl adenosine 3'-phosphodiester
  modified_base 17: mod_base = OTHER; note = 2'-O-methoxyethyl thymidine 3'-phosphodiester
  modified_base 18: mod_base = OTHER; note = 2'-O-methoxyethyl guanosine 3'-phosphorothioate
  modified_base 19: mod_base = OTHER; note = 2'-O-methoxyethyl thymidine 3'-phosphorothioate
  modified_base 20: mod_base = OTHER; note = 2'-O-methoxyethyl adenosine
cgtggtggtgtgcgcatgta

SEQ ID NO: 3369 - DNA, 20 bp, synthetic construct
  source 1..20: mol_type = other DNA
  modified_base 1: mod_base = OTHER; note = 2'-O-methoxyethyl adenosine 3'-phosphorothioate
  modified_base 2: mod_base = OTHER; note = 2'-O-methoxyethyl guanosine 3'-phosphodiester
  modified_base 3..4: mod_base = OTHER; note = 2'-O-methoxyethyl thymidine 3'-phosphodiester
  modified_base 5: mod_base = OTHER; note = 2'-O-methoxyethyl 5-methyl cytidine 3'-phosphodiester
  modified_base 6: mod_base = OTHER; note = 2'-deoxyadenosine 3'-phosphorothioate
  modified_base 7..8: mod_base = OTHER; note = 5-methyl 2'-deoxycytidine 3'-phosphorothioate
  modified_base 9: mod_base = OTHER; note = 2'-deoxythymidine 3'-phosphorothioate
  modified_base 10: mod_base = OTHER; note = 2'-deoxyguanosine 3'-phosphorothioate
  modified_base 11: mod_base = OTHER; note = 5-methyl 2'-deoxycytidine 3'-phosphorothioate
  modified_base 12: mod_base = OTHER; note = 2'-deoxyadenosine 3'-phosphorothioate
  modified_base 13: mod_base = OTHER; note = 2'-deoxythymidine 3'-phosphorothioate
  modified_base 14..15: mod_base = OTHER; note = 5-methyl 2'-deoxycytidine 3'-phosphorothioate
  modified_base 16: mod_base = OTHER; note = 2'-O-methoxyethyl 5-methyl cytidine 3'-phosphodiester
  modified_base 17: mod_base = OTHER; note = 2'-O-methoxyethyl adenosine 3'-phosphodiester
  modified_base 18..19: mod_base = OTHER; note = 2'-O-methoxyethyl guanosine 3'-phosphorothioate
  modified_base 20: mod_base = OTHER; note = 2'-O-methoxyethyl guanosine
agttcacctgcatcccaggg

SEQ ID NO: 3370 - DNA, 20 bp, synthetic construct
  source 1..20: mol_type = other DNA
  modified_base 1: mod_base = OTHER; note = 2'-O-methoxyethyl guanosine 3'-phosphorothioate
  modified_base 2: mod_base = OTHER; note = 2'-O-methoxyethyl adenosine 3'-phosphodiester
  modified_base 3: mod_base = OTHER; note = 2'-O-methoxyethyl guanosine 3'-phosphodiester
  modified_base 4..5: mod_base = OTHER; note = 2'-O-methoxyethyl thymidine 3'-phosphodiester
  modified_base 6: mod_base = OTHER; note = 5-methyl 2'-deoxycytidine 3'-phosphorothioate
  modified_base 7: mod_base = OTHER; note = 2'-deoxyadenosine 3'-phosphorothioate
  modified_base 8..9: mod_base = OTHER; note = 5-methyl 2'-deoxycytidine 3'-phosphorothioate
  modified_base 10: mod_base = OTHER; note = 2'-deoxythymidine 3'-phosphorothioate
  modified_base 11: mod_base = OTHER; note = 2'-deoxyguanosine 3'-phosphorothioate
  modified_base 12: mod_base = OTHER; note = 5-methyl 2'-deoxycytidine 3'-phosphorothioate
  modified_base 13: mod_base = OTHER; note = 2'-deoxyadenosine 3'-phosphorothioate
  modified_base 14: mod_base = OTHER; note = 2'-deoxythymidine 3'-phosphorothioate
  modified_base 15: mod_base = OTHER; note = 5-methyl 2'-deoxycytidine 3'-phosphorothioate
  modified_base 16..17: mod_base = OTHER; note = 2'-O-methoxyethyl 5-methyl cytidine 3'-phosphodiester
  modified_base 18: mod_base = OTHER; note = 2'-O-methoxyethyl adenosine 3'-phosphorothioate
  modified_base 19: mod_base = OTHER; note = 2'-O-methoxyethyl guanosine 3'-phosphorothioate
  modified_base 20: mod_base = OTHER; note = 2'-O-methoxyethyl guanosine
gagttcacctgcatcccagg

SEQ ID NO: 3371 - DNA, 20 bp, synthetic construct
  source 1..20: mol_type = other DNA
  modified_base 1: mod_base = OTHER; note = 2'-O-methoxyethyl thymidine 3'-phosphorothioate
  modified_base 2: mod_base = OTHER; note = 2'-O-methoxyethyl guanosine 3'-phosphodiester
  modified_base 3: mod_base = OTHER; note = 2'-O-methoxyethyl adenosine 3'-phosphodiester
  modified_base 4: mod_base = OTHER; note = 2'-O-methoxyethyl guanosine 3'-phosphodiester
  modified_base 5: mod_base = OTHER; note = 2'-O-methoxyethyl thymidine 3'-phosphodiester
  modified_base 6: mod_base = OTHER; note = 2'-deoxythymidine 3'-phosphorothioate
  modified_base 7: mod_base = OTHER; note = 5-methyl 2'-deoxycytidine 3'-phosphorothioate
  modified_base 8: mod_base = OTHER; note = 2'-deoxyadenosine 3'-phosphorothioate
  modified_base 9..10: mod_base = OTHER; note = 5-methyl 2'-deoxycytidine 3'-phosphorothioate
  modified_base 11: mod_base = OTHER; note = 2'-deoxythymidine 3'-phosphorothioate
  modified_base 12: mod_base = OTHER; note = 2'-deoxyguanosine 3'-phosphorothioate
  modified_base 13: mod_base = OTHER; note = 5-methyl 2'-deoxycytidine 3'-phosphorothioate
  modified_base 14: mod_base = OTHER; note = 2'-deoxyadenosine 3'-phosphorothioate
  modified_base 15: mod_base = OTHER; note = 2'-deoxythymidine 3'-phosphorothioate
  modified_base 16..17: mod_base = OTHER; note = 2'-O-methoxyethyl 5-methyl cytidine 3'-phosphodiester
  modified_base 18: mod_base = OTHER; note = 2'-O-methoxyethyl 5-methyl cytidine 3'-phosphorothioate
  modified_base 19: mod_base = OTHER; note = 2'-O-methoxyethyl adenosine 3'-phosphorothioate
  modified_base 20: mod_base = OTHER; note = 2'-O-methoxyethyl guanosine
tgagttcacctgcatcccag

SEQ ID NO: 3372 - DNA, 20 bp, synthetic construct
  source 1..20: mol_type = other DNA
  modified_base 1: mod_base = OTHER; note = 2'-O-methoxyethyl thymidine 3'-phosphorothioate
  modified_base 2: mod_base = OTHER; note = 2'-O-methoxyethyl guanosine 3'-phosphodiester
  modified_base 3: mod_base = OTHER; note = 2'-O-methoxyethyl thymidine 3'-phosphodiester
  modified_base 4: mod_base = OTHER; note = 2'-O-methoxyethyl guanosine 3'-phosphodiester
  modified_base 5: mod_base = OTHER; note = 2'-O-methoxyethyl adenosine 3'-phosphodiester
  modified_base 6: mod_base = OTHER; note = 2'-deoxyguanosine 3'-phosphorothioate
  modified_base 7..8: mod_base = OTHER; note = 2'-deoxythymidine 3'-phosphorothioate
  modified_base 9: mod_base = OTHER; note = 5-methyl 2'-deoxycytidine 3'-phosphorothioate
  modified_base 10: mod_base = OTHER; note = 2'-deoxyadenosine 3'-phosphorothioate
  modified_base 11..12: mod_base = OTHER; note = 5-methyl 2'-deoxycytidine 3'-phosphorothioate
  modified_base 13: mod_base = OTHER; note = 2'-deoxythymidine 3'-phosphorothioate
  modified_base 14: mod_base = OTHER; note = 2'-deoxyguanosine 3'-phosphorothioate
  modified_base 15: mod_base = OTHER; note = 5-methyl 2'-deoxycytidine 3'-phosphorothioate
  modified_base 16: mod_base = OTHER; note = 2'-O-methoxyethyl adenosine 3'-phosphodiester
  modified_base 17: mod_base = OTHER; note = 2'-O-methoxyethyl thymidine 3'-phosphodiester
  modified_base 18..19: mod_base = OTHER; note = 2'-O-methoxyethyl 5-methyl cytidine 3'-phosphorothioate
  modified_base 20: mod_base = OTHER; note = 2'-O-methoxyethyl 5-methyl cytidine
tgtgagttcacctgcatccc

SEQ ID NO: 3373 - DNA, 20 bp, synthetic construct
  source 1..20: mol_type = other DNA
  modified_base 1: mod_base = OTHER; note = 2'-O-methoxyethyl 5-methyl cytidine 3'-phosphorothioate
  modified_base 2: mod_base = OTHER; note = 2'-O-methoxyethyl thymidine 3'-phosphodiester
  modified_base 3: mod_base = OTHER; note = 2'-O-methoxyethyl guanosine 3'-phosphodiester
  modified_base 4: mod_base = OTHER; note = 2'-O-methoxyethyl thymidine 3'-phosphodiester
  modified_base 5: mod_base = OTHER; note = 2'-O-methoxyethyl guanosine 3'-phosphodiester
  modified_base 6: mod_base = OTHER; note = 2'-deoxyadenosine 3'-phosphorothioate
  modified_base 7: mod_base = OTHER; note = 2'-deoxyguanosine 3'-phosphorothioate
  modified_base 8..9: mod_base = OTHER; note = 2'-deoxythymidine 3'-phosphorothioate
  modified_base 10: mod_base = OTHER; note = 5-methyl 2'-deoxycytidine 3'-phosphorothioate
  modified_base 11: mod_base = OTHER; note = 2'-deoxyadenosine 3'-phosphorothioate
  modified_base 12..13: mod_base = OTHER; note = 5-methyl 2'-deoxycytidine 3'-phosphorothioate
  modified_base 14: mod_base = OTHER; note = 2'-deoxythymidine 3'-phosphorothioate
  modified_base 15: mod_base = OTHER; note = 2'-deoxyguanosine 3'-phosphorothioate
  modified_base 16: mod_base = OTHER; note = 2'-O-methoxyethyl 5-methyl cytidine 3'-phosphodiester
  modified_base 17: mod_base = OTHER; note = 2'-O-methoxyethyl adenosine 3'-phosphodiester
  modified_base 18: mod_base = OTHER; note = 2'-O-methoxyethyl thymidine 3'-phosphorothioate
  modified_base 19: mod_base = OTHER; note = 2'-O-methoxyethyl 5-methyl cytidine 3'-phosphorothioate
  modified_base 20: mod_base = OTHER; note = 2'-O-methoxyethyl 5-methyl cytidine
ctgtgagttcacctgcatcc

SEQ ID NO: 3374 - DNA, 20 bp, synthetic construct
  source 1..20: mol_type = other DNA
  modified_base 1: mod_base = OTHER; note = 2'-O-methoxyethyl guanosine 3'-phosphorothioate
  modified_base 2: mod_base = OTHER; note = 2'-O-methoxyethyl 5-methyl cytidine 3'-phosphodiester
  modified_base 3: mod_base = OTHER; note = 2'-O-methoxyethyl thymidine 3'-phosphodiester
  modified_base 4: mod_base = OTHER; note = 2'-O-methoxyethyl guanosine 3'-phosphodiester
  modified_base 5: mod_base = OTHER; note = 2'-O-methoxyethyl thymidine 3'-phosphodiester
  modified_base 6: mod_base = OTHER; note = 2'-deoxyguanosine 3'-phosphorothioate
  modified_base 7: mod_base = OTHER; note = 2'-deoxyadenosine 3'-phosphorothioate
  modified_base 8: mod_base = OTHER; note = 2'-deoxyguanosine 3'-phosphorothioate
  modified_base 9..10: mod_base = OTHER; note = 2'-deoxythymidine 3'-phosphorothioate
  modified_base 11: mod_base = OTHER; note = 5-methyl 2'-deoxycytidine 3'-phosphorothioate
  modified_base 12: mod_base = OTHER; note = 2'-deoxyadenosine 3'-phosphorothioate
  modified_base 13..14: mod_base = OTHER; note = 5-methyl 2'-deoxycytidine 3'-phosphorothioate
  modified_base 15: mod_base = OTHER; note = 2'-deoxythymidine 3'-phosphorothioate
  modified_base 16: mod_base = OTHER; note = 2'-O-methoxyethyl guanosine 3'-phosphodiester
  modified_base 17: mod_base = OTHER; note = 2'-O-methoxyethyl 5-methyl cytidine 3'-phosphodiester
  modified_base 18: mod_base = OTHER; note = 2'-O-methoxyethyl adenosine 3'-phosphorothioate
  modified_base 19: mod_base = OTHER; note = 2'-O-methoxyethyl thymidine 3'-phosphorothioate
  modified_base 20: mod_base = OTHER; note = 2'-O-methoxyethyl 5-methyl cytidine
gctgtgagttcacctgcatc

SEQ ID NO: 3375 - DNA, 20 bp, synthetic construct
  source 1..20: mol_type = other DNA
  modified_base 1: mod_base = OTHER; note = 2'-O-methoxyethyl guanosine 3'-phosphorothioate
  modified_base 2: mod_base = OTHER; note = 2'-O-methoxyethyl 5-methyl cytidine 3'-phosphodiester
  modified_base 3..4: mod_base = OTHER; note = 2'-O-methoxyethyl guanosine 3'-phosphodiester
  modified_base 5: mod_base = OTHER; note = 2'-O-methoxyethyl thymidine 3'-phosphodiester
  modified_base 6: mod_base = OTHER; note = 2'-deoxyguanosine 3'-phosphorothioate
  modified_base 7..8: mod_base = OTHER; note = 2'-deoxyadenosine 3'-phosphorothioate
  modified_base 9..10: mod_base = OTHER; note = 2'-deoxythymidine 3'-phosphorothioate
  modified_base 11: mod_base = OTHER; note = 5-methyl 2'-deoxycytidine 3'-phosphorothioate
  modified_base 12: mod_base = OTHER; note = 2'-deoxythymidine 3'-phosphorothioate
  modified_base 13: mod_base = OTHER; note = 2'-deoxyguanosine 3'-phosphorothioate
  modified_base 14: mod_base = OTHER; note = 2'-deoxythymidine 3'-phosphorothioate
  modified_base 15: mod_base = OTHER; note = 5-methyl 2'-deoxycytidine 3'-phosphorothioate
  modified_base 16: mod_base = OTHER; note = 2'-O-methoxyethyl thymidine 3'-phosphodiester
  modified_base 17: mod_base = OTHER; note = 2'-O-methoxyethyl 5-methyl cytidine 3'-phosphodiester
  modified_base 18..19: mod_base = OTHER; note = 2'-O-methoxyethyl 5-methyl cytidine 3'-phosphorothioate
  modified_base 20: mod_base = OTHER; note = 2'-O-methoxyethyl adenosine
gcggtgaattctgtctccca

SEQ ID NO: 3376 - DNA, 20 bp, synthetic construct
  source 1..20: mol_type = other DNA
  modified_base 1: mod_base = OTHER; note = 2'-O-methoxyethyl thymidine 3'-phosphorothioate
  modified_base 2: mod_base = OTHER; note = 2'-O-methoxyethyl adenosine 3'-phosphodiester
  modified_base 3: mod_base = OTHER; note = 2'-O-methoxyethyl 5-methyl cytidine 3'-phosphodiester
  modified_base 4: mod_base = OTHER; note = 2'-O-methoxyethyl guanosine 3'-phosphodiester
  modified_base 5: mod_base = OTHER; note = 2'-O-methoxyethyl 5-methyl cytidine 3'-phosphodiester
  modified_base 6..7: mod_base = OTHER; note = 2'-deoxyguanosine 3'-phosphorothioate
  modified_base 8: mod_base = OTHER; note = 2'-deoxythymidine 3'-phosphorothioate
  modified_base 9: mod_base = OTHER; note = 2'-deoxyguanosine 3'-phosphorothioate
  modified_base 10..11: mod_base = OTHER; note = 2'-deoxyadenosine 3'-phosphorothioate
  modified_base 12..13: mod_base = OTHER; note = 2'-deoxythymidine 3'-phosphorothioate
  modified_base 14: mod_base = OTHER; note = 5-methyl 2'-deoxycytidine 3'-phosphorothioate
  modified_base 15: mod_base = OTHER; note = 2'-deoxythymidine 3'-phosphorothioate
  modified_base 16: mod_base = OTHER; note = 2'-O-methoxyethyl guanosine 3'-phosphodiester
  modified_base 17: mod_base = OTHER; note = 2'-O-methoxyethyl thymidine 3'-phosphodiester
  modified_base 18: mod_base = OTHER; note = 2'-O-methoxyethyl 5-methyl cytidine 3'-phosphorothioate
  modified_base 19: mod_base = OTHER; note = 2'-O-methoxyethyl thymidine 3'-phosphorothioate
  modified_base 20: mod_base = OTHER; note = 2'-O-methoxyethyl 5-methyl cytidine
tacgcggtgaattctgtctc

SEQ ID NO: 3377 - DNA, 20 bp, synthetic construct
  source 1..20: mol_type = other DNA
  modified_base 1: mod_base = OTHER; note = 2'-O-methoxyethyl 5-methyl cytidine 3'-phosphorothioate
  modified_base 2: mod_base = OTHER; note = 2'-O-methoxyethyl adenosine 3'-phosphodiester
  modified_base 3: mod_base = OTHER; note = 2'-O-methoxyethyl thymidine 3'-phosphodiester
  modified_base 4: mod_base = OTHER; note = 2'-O-methoxyethyl adenosine 3'-phosphodiester
  modified_base 5: mod_base = OTHER; note = 2'-O-methoxyethyl 5-methyl cytidine 3'-phosphodiester
  modified_base 6: mod_base = OTHER; note = 2'-deoxyguanosine 3'-phosphorothioate
  modified_base 7: mod_base = OTHER; note = 5-methyl 2'-deoxycytidine 3'-phosphorothioate
  modified_base 8..9: mod_base = OTHER; note = 2'-deoxyguanosine 3'-phosphorothioate
  modified_base 10: mod_base = OTHER; note = 2'-deoxythymidine 3'-phosphorothioate
  modified_base 11: mod_base = OTHER; note = 2'-deoxyguanosine 3'-phosphorothioate
  modified_base 12..13: mod_base = OTHER; note = 2'-deoxyadenosine 3'-phosphorothioate
  modified_base 14..15: mod_base = OTHER; note = 2'-deoxythymidine 3'-phosphorothioate
  modified_base 16: mod_base = OTHER; note = 2'-O-methoxyethyl 5-methyl cytidine 3'-phosphodiester
  modified_base 17: mod_base = OTHER; note = 2'-O-methoxyethyl thymidine 3'-phosphodiester
  modified_base 18: mod_base = OTHER; note = 2'-O-methoxyethyl guanosine 3'-phosphorothioate
  modified_base 19: mod_base = OTHER; note = 2'-O-methoxyethyl thymidine 3'-phosphorothioate
  modified_base 20: mod_base = OTHER; note = 2'-O-methoxyethyl 5-methyl cytidine
catacgcggtgaattctgtc

SEQ ID NO: 3378 - DNA, 20 bp, synthetic construct
  source 1..20: mol_type = other DNA
  modified_base 1: mod_base = OTHER; note = 2'-O-methoxyethyl adenosine 3'-phosphorothioate
  modified_base 2: mod_base = OTHER; note = 2'-O-methoxyethyl 5-methyl cytidine 3'-phosphodiester
  modified_base 3: mod_base = OTHER; note = 2'-O-methoxyethyl thymidine 3'-phosphodiester
  modified_base 4: mod_base = OTHER; note = 2'-O-methoxyethyl guanosine 3'-phosphodiester
  modified_base 5: mod_base = OTHER; note = 2'-O-methoxyethyl thymidine 3'-phosphodiester
  modified_base 6..7: mod_base = OTHER; note = 2'-deoxythymidine 3'-phosphorothioate
  modified_base 8: mod_base = OTHER; note = 5-methyl 2'-deoxycytidine 3'-phosphorothioate
  modified_base 9: mod_base = OTHER; note = 2'-deoxyguanosine 3'-phosphorothioate
  modified_base 10: mod_base = OTHER; note = 2'-deoxyadenosine 3'-phosphorothioate
  modified_base 11..12: mod_base = OTHER; note = 5-methyl 2'-deoxycytidine 3'-phosphorothioate
  modified_base 13: mod_base = OTHER; note = 2'-deoxythymidine 3'-phosphorothioate
  modified_base 14: mod_base = OTHER; note = 5-methyl 2'-deoxycytidine 3'-phosphorothioate
  modified_base 15: mod_base = OTHER; note = 2'-deoxythymidine 3'-phosphorothioate
  modified_base 16: mod_base = OTHER; note = 2'-O-methoxyethyl guanosine 3'-phosphodiester
  modified_base 17: mod_base = OTHER; note = 2'-O-methoxyethyl adenosine 3'-phosphodiester
  modified_base 18..19: mod_base = OTHER; note = 2'-O-methoxyethyl adenosine 3'-phosphorothioate
  modified_base 20: mod_base = OTHER; note = 2'-O-methoxyethyl adenosine
actgtttcgacctctgaaaa

SEQ ID NO: 3379 - DNA, 20 bp, synthetic construct
  source 1..20: mol_type = other DNA
  modified_base 1: mod_base = OTHER; note = 2'-O-methoxyethyl thymidine 3'-phosphorothioate
  modified_base 2: mod_base = OTHER; note = 2'-O-methoxyethyl adenosine 3'-phosphodiester
  modified_base 3: mod_base = OTHER; note = 2'-O-methoxyethyl 5-methyl cytidine 3'-phosphodiester
  modified_base 4: mod_base = OTHER; note = 2'-O-methoxyethyl thymidine 3'-phosphodiester
  modified_base 5: mod_base = OTHER; note = 2'-O-methoxyethyl guanosine 3'-phosphodiester
  modified_base 6..8: mod_base = OTHER; note = 2'-deoxythymidine 3'-phosphorothioate
  modified_base 9: mod_base = OTHER; note = 5-methyl 2'-deoxycytidine 3'-phosphorothioate
  modified_base 10: mod_base = OTHER; note = 2'-deoxyguanosine 3'-phosphorothioate
  modified_base 11: mod_base = OTHER; note = 2'-deoxyadenosine 3'-phosphorothioate
  modified_base 12..13: mod_base = OTHER; note = 5-methyl 2'-deoxycytidine 3'-phosphorothioate
  modified_base 14: mod_base = OTHER; note = 2'-deoxythymidine 3'-phosphorothioate
  modified_base 15: mod_base = OTHER; note = 5-methyl 2'-deoxycytidine 3'-phosphorothioate
  modified_base 16: mod_base = OTHER; note = 2'-O-methoxyethyl thymidine 3'-phosphodiester
  modified_base 17: mod_base = OTHER; note = 2'-O-methoxyethyl guanosine 3'-phosphodiester
  modified_base 18..19: mod_base = OTHER; note = 2'-O-methoxyethyl adenosine 3'-phosphorothioate
  modified_base 20: mod_base = OTHER; note = 2'-O-methoxyethyl adenosine
tactgtttcgacctctgaaa

SEQ ID NO: 3380 - DNA, 20 bp, synthetic construct
  source 1..20: mol_type = other DNA
  modified_base 1: mod_base = OTHER; note = 2'-O-methoxyethyl thymidine 3'-phosphorothioate
  modified_base 2: mod_base = OTHER; note = 2'-O-methoxyethyl thymidine 3'-phosphodiester
  modified_base 3: mod_base = OTHER; note = 2'-O-methoxyethyl adenosine 3'-phosphodiester
  modified_base 4: mod_base = OTHER; note = 2'-O-methoxyethyl 5-methyl cytidine 3'-phosphodiester
  modified_base 5: mod_base = OTHER; note = 2'-O-methoxyethyl thymidine 3'-phosphodiester
  modified_base 6: mod_base = OTHER; note = 2'-deoxyguanosine 3'-phosphorothioate
  modified_base 7..9: mod_base = OTHER; note = 2'-deoxythymidine 3'-phosphorothioate
  modified_base 10: mod_base = OTHER; note = 5-methyl 2'-deoxycytidine 3'-phosphorothioate
  modified_base 11: mod_base = OTHER; note = 2'-deoxyguanosine 3'-phosphorothioate
  modified_base 12: mod_base = OTHER; note = 2'-deoxyadenosine 3'-phosphorothioate
  modified_base 13..14: mod_base = OTHER; note = 5-methyl 2'-deoxycytidine 3'-phosphorothioate
  modified_base 15: mod_base = OTHER; note = 2'-deoxythymidine 3'-phosphorothioate
  modified_base 16: mod_base = OTHER; note = 2'-O-methoxyethyl 5-methyl cytidine 3'-phosphodiester
  modified_base 17: mod_base = OTHER; note = 2'-O-methoxyethyl thymidine 3'-phosphodiester
  modified_base 18: mod_base = OTHER; note = 2'-O-methoxyethyl guanosine 3'-phosphorothioate
  modified_base 19: mod_base = OTHER; note = 2'-O-methoxyethyl adenosine 3'-phosphorothioate
  modified_base 20: mod_base = OTHER; note = 2'-O-methoxyethyl adenosine
ttactgtttcgacctctgaa

SEQ ID NO: 3381 - DNA, 20 bp, synthetic construct
  source 1..20: mol_type = other DNA
  modified_base 1: mod_base = OTHER; note = 2'-O-methoxyethyl thymidine 3'-phosphorothioate
  modified_base 2: mod_base = OTHER; note = 2'-O-methoxyethyl guanosine 3'-phosphodiester
  modified_base 3..4: mod_base = OTHER; note = 2'-O-methoxyethyl thymidine 3'-phosphodiester
  modified_base 5: mod_base = OTHER; note = 2'-O-methoxyethyl adenosine 3'-phosphodiester
  modified_base 6: mod_base = OTHER; note = 5-methyl 2'-deoxycytidine 3'-phosphorothioate
  modified_base 7: mod_base = OTHER; note = 2'-deoxythymidine 3'-phosphorothioate
  modified_base 8: mod_base = OTHER; note = 2'-deoxyguanosine 3'-phosphorothioate
  modified_base 9..11: mod_base = OTHER; note = 2'-deoxythymidine 3'-phosphorothioate
  modified_base 12: mod_base = OTHER; note = 5-methyl 2'-deoxycytidine 3'-phosphorothioate
  modified_base 13: mod_base = OTHER; note = 2'-deoxyguanosine 3'-phosphorothioate
  modified_base 14: mod_base = OTHER; note = 2'-deoxyadenosine 3'-phosphorothioate
  modified_base 15: mod_base = OTHER; note = 5-methyl 2'-deoxycytidine 3'-phosphorothioate
  modified_base 16: mod_base = OTHER; note = 2'-O-methoxyethyl 5-methyl cytidine 3'-phosphodiester
  modified_base 17: mod_base = OTHER; note = 2'-O-methoxyethyl thymidine 3'-phosphodiester
  modified_base 18: mod_base = OTHER; note = 2'-O-methoxyethyl 5-methyl cytidine 3'-phosphorothioate
  modified_base 19: mod_base = OTHER; note = 2'-O-methoxyethyl thymidine 3'-phosphorothioate
  modified_base 20: mod_base = OTHER; note = 2'-O-methoxyethyl guanosine
tgttactgtttcgacctctg

SEQ ID NO: 3382 - DNA, 20 bp, synthetic construct
  source 1..20: mol_type = other DNA
  modified_base 1: mod_base = OTHER; note = 2'-O-methoxyethyl thymidine 3'-phosphorothioate
  modified_base 2: mod_base = OTHER; note = 2'-O-methoxyethyl guanosine 3'-phosphodiester
  modified_base 3: mod_base = OTHER; note = 2'-O-methoxyethyl thymidine 3'-phosphodiester
  modified_base 4: mod_base = OTHER; note = 2'-O-methoxyethyl adenosine 3'-phosphodiester
  modified_base 5: mod_base = OTHER; note = 2'-O-methoxyethyl 5-methyl cytidine 3'-phosphorothioate
  modified_base 6..7: mod_base = OTHER; note = 2'-deoxythymidine 3'-phosphorothioate
  modified_base 8: mod_base = OTHER; note = 5-methyl 2'-deoxycytidine 3'-phosphorothioate
  modified_base 9: mod_base = OTHER; note = 2'-deoxyadenosine 3'-phosphorothioate
  modified_base 10: mod_base = OTHER; note = 5-methyl 2'-deoxycytidine 3'-phosphorothioate
  modified_base 11: mod_base = OTHER; note = 2'-deoxyadenosine 3'-phosphorothioate
  modified_base 12..14: mod_base = OTHER; note = 2'-deoxythymidine 3'-phosphorothioate
  modified_base 15: mod_base = OTHER; note = 2'-deoxyguanosine 3'-phosphorothioate
  modified_base 16: mod_base = OTHER; note = 2'-O-methoxyethyl guanosine 3'-phosphodiester
  modified_base 17: mod_base = OTHER; note = 2'-O-methoxyethyl adenosine 3'-phosphodiester
  modified_base 18: mod_base = OTHER; note = 2'-O-methoxyethyl guanosine 3'-phosphorothioate
  modified_base 19: mod_base = OTHER; note = 2'-O-methoxyethyl 5-methyl cytidine 3'-phosphorothioate
  modified_base 20: mod_base = OTHER; note = 2'-O-methoxyethyl 5-methyl cytidine
tgtacttcacatttggagcc

SEQ ID NO: 3383 - DNA, 20 bp, synthetic construct
  source 1..20: mol_type = other DNA
  modified_base 1: mod_base = OTHER; note = 2'-O-methoxyethyl thymidine 3'-phosphorothioate
  modified_base 2: mod_base = OTHER; note = 2'-O-methoxyethyl guanosine 3'-phosphodiester
  modified_base 3: mod_base = OTHER; note = 2'-O-methoxyethyl thymidine 3'-phosphodiester
  modified_base 4: mod_base = OTHER; note = 2'-O-methoxyethyl adenosine 3'-phosphorothioate
  modified_base 5: mod_base = OTHER; note = 2'-O-methoxyethyl 5-methyl cytidine 3'-phosphorothioate
  modified_base 6..7: mod_base = OTHER; note = 2'-deoxythymidine 3'-phosphorothioate
  modified_base 8: mod_base = OTHER; note = 5-methyl 2'-deoxycytidine 3'-phosphorothioate
  modified_base 9: mod_base = OTHER; note = 2'-deoxyadenosine 3'-phosphorothioate
  modified_base 10: mod_base = OTHER; note = 5-methyl 2'-deoxycytidine 3'-phosphorothioate
  modified_base 11: mod_base = OTHER; note = 2'-deoxyadenosine 3'-phosphorothioate
  modified_base 12..14: mod_base = OTHER; note = 2'-deoxythymidine 3'-phosphorothioate
  modified_base 15: mod_base = OTHER; note = 2'-deoxyguanosine 3'-phosphorothioate
  modified_base 16: mod_base = OTHER; note = 2'-O-methoxyethyl guanosine 3'-phosphodiester
  modified_base 17: mod_base = OTHER; note = 2'-O-methoxyethyl adenosine 3'-phosphodiester
  modified_base 18: mod_base = OTHER; note = 2'-O-methoxyethyl guanosine 3'-phosphorothioate
  modified_base 19: mod_base = OTHER; note = 2'-O-methoxyethyl 5-methyl cytidine 3'-phosphorothioate
  modified_base 20: mod_base = OTHER; note = 2'-O-methoxyethyl 5-methyl cytidine
tgtacttcacatttggagcc

SEQ ID NO: 3384 - DNA, 20 bp, synthetic construct
  source 1..20: mol_type = other DNA
  modified_base 1: mod_base = OTHER; note = 2'-O-methoxyethyl thymidine 3'-phosphorothioate
  modified_base 2: mod_base = OTHER; note = 2'-O-methoxyethyl 5-methyl cytidine 3'-phosphodiester
  modified_base 3: mod_base = OTHER; note = 2'-O-methoxyethyl thymidine 3'-phosphodiester
  modified_base 4: mod_base = OTHER; note = 2'-O-methoxyethyl guanosine 3'-phosphorothioate
  modified_base 5: mod_base = OTHER; note = 2'-O-methoxyethyl thymidine 3'-phosphorothioate
  modified_base 6: mod_base = OTHER; note = 2'-deoxyadenosine 3'-phosphorothioate
  modified_base 7: mod_base = OTHER; note = 5-methyl 2'-deoxycytidine 3'-phosphorothioate
  modified_base 8..11: mod_base = OTHER; note = 2'-deoxythymidine 3'-phosphorothioate
  modified_base 12: mod_base = OTHER; note = 5-methyl 2'-deoxycytidine 3'-phosphorothioate
  modified_base 13: mod_base = OTHER; note = 2'-deoxythymidine 3'-phosphorothioate
  modified_base 14: mod_base = OTHER; note = 5-methyl 2'-deoxycytidine 3'-phosphorothioate
  modified_base 15: mod_base = OTHER; note = 2'-deoxyadenosine 3'-phosphorothioate
  modified_base 16: mod_base = OTHER; note = 2'-O-methoxyethyl thymidine 3'-phosphodiester
  modified_base 17: mod_base = OTHER; note = 2'-O-methoxyethyl guanosine 3'-phosphodiester
  modified_base 18: mod_base = OTHER; note = 2'-O-methoxyethyl thymidine 3'-phosphorothioate
  modified_base 19: mod_base = OTHER; note = 2'-O-methoxyethyl guanosine 3'-phosphorothioate
  modified_base 20: mod_base = OTHER; note = 2'-O-methoxyethyl 5-methyl cytidine
tctgtacttttctcatgtgc

SEQ ID NO: 3385 - DNA, 20 bp, synthetic construct
  source 1..20: mol_type = other DNA
  modified_base 1: mod_base = OTHER; note = 2'-O-methoxyethyl 5-methyl cytidine 3'-phosphorothioate
  modified_base 2: mod_base = OTHER; note = 2'-O-methoxyethyl adenosine 3'-phosphodiester
  modified_base 3: mod_base = OTHER; note = 2'-O-methoxyethyl 5-methyl cytidine 3'-phosphodiester
  modified_base 4: mod_base = OTHER; note = 2'-O-methoxyethyl adenosine 3'-phosphodiester
  modified_base 5: mod_base = OTHER; note = 2'-O-methoxyethyl guanosine 3'-phosphorothioate
  modified_base 6..8: mod_base = OTHER; note = 2'-deoxythymidine 3'-phosphorothioate
  modified_base 9: mod_base = OTHER; note = 5-methyl 2'-deoxycytidine 3'-phosphorothioate
  modified_base 10: mod_base = OTHER; note = 2'-deoxyadenosine 3'-phosphorothioate
  modified_base 11: mod_base = OTHER; note = 5-methyl 2'-deoxycytidine 3'-phosphorothioate
  modified_base 12: mod_base = OTHER; note = 2'-deoxythymidine 3'-phosphorothioate
  modified_base 13: mod_base = OTHER; note = 2'-deoxyadenosine 3'-phosphorothioate
  modified_base 14..15: mod_base = OTHER; note = 2'-deoxyguanosine 3'-phosphorothioate
  modified_base 16..17: mod_base = OTHER; note = 2'-O-methoxyethyl thymidine 3'-phosphodiester
  modified_base 18: mod_base = OTHER; note = 2'-O-methoxyethyl 5-methyl cytidine 3'-phosphorothioate
  modified_base 19: mod_base = OTHER; note = 2'-O-methoxyethyl thymidine 3'-phosphorothioate
  modified_base 20: mod_base = OTHER; note = 2'-O-methoxyethyl 5-methyl cytidine
cacagtttcactaggttctc

SEQ ID NO: 3386 - DNA, 20 bp, synthetic construct
  source 1..20: mol_type = other DNA
  modified_base 1: mod_base = OTHER; note = 2'-O-methoxyethyl 5-methyl cytidine 3'-phosphorothioate
  modified_base 2: mod_base = OTHER; note = 2'-O-methoxyethyl adenosine 3'-phosphodiester
  modified_base 3: mod_base = OTHER; note = 2'-O-methoxyethyl 5-methyl cytidine 3'-phosphodiester
  modified_base 4: mod_base = OTHER; note = 2'-O-methoxyethyl adenosine 3'-phosphorothioate
  modified_base 5: mod_base = OTHER; note = 2'-O-methoxyethyl guanosine 3'-phosphorothioate
  modified_base 6..8: mod_base = OTHER; note = 2'-deoxythymidine 3'-phosphorothioate
  modified_base 9: mod_base = OTHER; note = 5-methyl 2'-deoxycytidine 3'-phosphorothioate
  modified_base 10: mod_base = OTHER; note = 2'-deoxyadenosine 3'-phosphorothioate
  modified_base 11: mod_base = OTHER; note = 5-methyl 2'-deoxycytidine 3'-phosphorothioate
  modified_base 12: mod_base = OTHER; note = 2'-deoxythymidine 3'-phosphorothioate
  modified_base 13: mod_base = OTHER; note = 2'-deoxyadenosine 3'-phosphorothioate
  modified_base 14..15: mod_base = OTHER; note = 2'-deoxyguanosine 3'-phosphorothioate
  modified_base 16..17: mod_base = OTHER; note = 2'-O-methoxyethyl thymidine 3'-phosphodiester
  modified_base 18: mod_base = OTHER; note = 2'-O-methoxyethyl 5-methyl cytidine 3'-phosphorothioate
  modified_base 19: mod_base = OTHER; note = 2'-O-methoxyethyl thymidine 3'-phosphorothioate
  modified_base 20: mod_base = OTHER; note = 2'-O-methoxyethyl 5-methyl cytidine
cacagtttcactaggttctc

SEQ ID NO: 3387 - DNA, 20 bp, synthetic construct
  source 1..20: mol_type = other DNA
  modified_base 1: mod_base = OTHER; note = 2'-O-methoxyethyl adenosine 3'-phosphorothioate
  modified_base 2: mod_base = OTHER; note = 2'-O-methoxyethyl 5-methyl cytidine 3'-phosphodiester
  modified_base 3: mod_base = OTHER; note = 2'-O-methoxyethyl adenosine 3'-phosphodiester
  modified_base 4: mod_base = OTHER; note = 2'-O-methoxyethyl 5-methyl cytidine 3'-phosphodiester
  modified_base 5: mod_base = OTHER; note = 2'-O-methoxyethyl adenosine 3'-phosphorothioate
  modified_base 6: mod_base = OTHER; note = 2'-deoxyguanosine 3'-phosphorothioate
  modified_base 7..9: mod_base = OTHER; note = 2'-deoxythymidine 3'-phosphorothioate
  modified_base 10: mod_base = OTHER; note = 5-methyl 2'-deoxycytidine 3'-phosphorothioate
  modified_base 11: mod_base = OTHER; note = 2'-deoxyadenosine 3'-phosphorothioate
  modified_base 12: mod_base = OTHER; note = 5-methyl 2'-deoxycytidine 3'-phosphorothioate
  modified_base 13: mod_base = OTHER; note = 2'-deoxythymidine 3'-phosphorothioate
  modified_base 14: mod_base = OTHER; note = 2'-deoxyadenosine 3'-phosphorothioate
  modified_base 15: mod_base = OTHER; note = 2'-deoxyguanosine 3'-phosphorothioate
  modified_base 16: mod_base = OTHER; note = 2'-O-methoxyethyl guanosine 3'-phosphodiester
  modified_base 17: mod_base = OTHER; note = 2'-O-methoxyethyl thymidine 3'-phosphodiester
  modified_base 18: mod_base = OTHER; note = 2'-O-methoxyethyl thymidine 3'-phosphorothioate
  modified_base 19: mod_base = OTHER; note = 2'-O-methoxyethyl 5-methyl cytidine 3'-phosphorothioate
  modified_base 20: mod_base = OTHER; note = 2'-O-methoxyethyl thymidine
acacagtttcactaggttct

SEQ ID NO: 3388 - DNA, 20 bp, synthetic construct
  source 1..20: mol_type = other DNA
  modified_base 1: mod_base = OTHER; note = 2'-O-methoxyethyl adenosine 3'-phosphorothioate
  modified_base 2: mod_base = OTHER; note = 2'-O-methoxyethyl 5-methyl cytidine 3'-phosphodiester
  modified_base 3: mod_base = OTHER; note = 2'-O-methoxyethyl adenosine 3'-phosphodiester
  modified_base 4: mod_base = OTHER; note = 2'-O-methoxyethyl 5-methyl cytidine 3'-phosphorothioate
  modified_base 5: mod_base = OTHER; note = 2'-O-methoxyethyl adenosine 3'-phosphorothioate
  modified_base 6: mod_base = OTHER; note = 2'-deoxyguanosine 3'-phosphorothioate
  modified_base 7..9: mod_base = OTHER; note = 2'-deoxythymidine 3'-phosphorothioate
  modified_base 10: mod_base = OTHER; note = 5-methyl 2'-deoxycytidine 3'-phosphorothioate
  modified_base 11: mod_base = OTHER; note = 2'-deoxyadenosine 3'-phosphorothioate
  modified_base 12: mod_base = OTHER; note = 5-methyl 2'-deoxycytidine 3'-phosphorothioate
  modified_base 13: mod_base = OTHER; note = 2'-deoxythymidine 3'-phosphorothioate
  modified_base 14: mod_base = OTHER; note = 2'-deoxyadenosine 3'-phosphorothioate
  modified_base 15: mod_base = OTHER; note = 2'-deoxyguanosine 3'-phosphorothioate
  modified_base 16: mod_base = OTHER; note = 2'-O-methoxyethyl guanosine 3'-phosphodiester
  modified_base 17: mod_base = OTHER; note = 2'-O-methoxyethyl thymidine 3'-phosphodiester
  modified_base 18: mod_base = OTHER; note = 2'-O-methoxyethyl thymidine 3'-phosphorothioate
  modified_base 19: mod_base = OTHER; note = 2'-O-methoxyethyl 5-methyl cytidine 3'-phosphorothioate
  modified_base 20: mod_base = OTHER; note = 2'-O-methoxyethyl thymidine
acacagtttcactaggttct

SEQ ID NO: 3389 - DNA, 20 bp, synthetic construct
  source 1..20: mol_type = other DNA
  modified_base 1: mod_base = OTHER; note = 2'-O-methoxyethyl thymidine 3'-phosphorothioate
  modified_base 2: mod_base = OTHER; note = 2'-O-methoxyethyl thymidine 3'-phosphodiester
  modified_base 3: mod_base = OTHER; note = 2'-O-methoxyethyl 5-methyl cytidine 3'-phosphodiester
  modified_base 4: mod_base = OTHER; note = 2'-O-methoxyethyl thymidine 3'-phosphodiester
  modified_base 5: mod_base = OTHER; note = 2'-O-methoxyethyl 5-methyl cytidine 3'-phosphorothioate
  modified_base 6: mod_base = OTHER; note = 2'-deoxythymidine 3'-phosphorothioate
  modified_base 7: mod_base = OTHER; note = 2'-deoxyadenosine 3'-phosphorothioate
  modified_base 8..10: mod_base = OTHER; note = 2'-deoxythymidine 3'-phosphorothioate
  modified_base 11: mod_base = OTHER; note = 5-methyl 2'-deoxycytidine 3'-phosphorothioate
  modified_base 12..14: mod_base = OTHER; note = 2'-deoxythymidine 3'-phosphorothioate
  modified_base 15: mod_base = OTHER; note = 2'-deoxyguanosine 3'-phosphorothioate
  modified_base 16: mod_base = OTHER; note = 2'-O-methoxyethyl thymidine 3'-phosphodiester
  modified_base 17: mod_base = OTHER; note = 2'-O-methoxyethyl 5-methyl cytidine 3'-phosphodiester
  modified_base 18: mod_base = OTHER; note = 2'-O-methoxyethyl 5-methyl cytidine 3'-phosphorothioate
  modified_base 19: mod_base = OTHER; note = 2'-O-methoxyethyl adenosine 3'-phosphorothioate
  modified_base 20: mod_base = OTHER; note = 2'-O-methoxyethyl guanosine
ttctctatttctttgtccag

SEQ ID NO: 3390 - DNA, 20 bp, synthetic construct
  source 1..20: mol_type = other DNA
  modified_base 1: mod_base = OTHER; note = 2'-O-methoxyethyl thymidine 3'-phosphorothioate
  modified_base 2: mod_base = OTHER; note = 2'-O-methoxyethyl thymidine 3'-phosphodiester
  modified_base 3: mod_base = OTHER; note = 2'-O-methoxyethyl 5-methyl cytidine 3'-phosphodiester
  modified_base 4: mod_base = OTHER; note = 2'-O-methoxyethyl thymidine 3'-phosphorothioate
  modified_base 5: mod_base = OTHER; note = 2'-O-methoxyethyl 5-methyl cytidine 3'-phosphorothioate
  modified_base 6: mod_base = OTHER; note = 2'-deoxythymidine 3'-phosphorothioate
  modified_base 7: mod_base = OTHER; note = 2'-deoxyadenosine 3'-phosphorothioate
  modified_base 8..10: mod_base = OTHER; note = 2'-deoxythymidine 3'-phosphorothioate
  modified_base 11: mod_base = OTHER; note = 5-methyl 2'-deoxycytidine 3'-phosphorothioate
  modified_base 12..14: mod_base = OTHER; note = 2'-deoxythymidine 3'-phosphorothioate
  modified_base 15: mod_base = OTHER; note = 2'-deoxyguanosine 3'-phosphorothioate
  modified_base 16: mod_base = OTHER; note = 2'-O-methoxyethyl thymidine 3'-phosphodiester
  modified_base 17: mod_base = OTHER; note = 2'-O-methoxyethyl 5-methyl cytidine 3'-phosphodiester
  modified_base 18: mod_base = OTHER; note = 2'-O-methoxyethyl 5-methyl cytidine 3'-phosphorothioate
  modified_base 19: mod_base = OTHER; note = 2'-O-methoxyethyl adenosine 3'-phosphorothioate
  modified_base 20: mod_base = OTHER; note = 2'-O-methoxyethyl guanosine
ttctctatttctttgtccag
